(19) United States
(12) Patent Application Publication
(10) Pub. No.: US 2004/0029222 A1
(43) Pub. Date: Feb. 12, 2004

(54) Proteins and nucleic acids encoding same

(76) Inventors: Shlomit R. Edinger, New Haven, CT (US); John R. MacDougall, Hamden, CT (US); Isabelle Millet, Milford, CT (US); Karen Ellerman, Branford, CT (US); David J. Stone, Guilford, CT (US); Valerie Gerlach, Branford, CT (US); William M. Grosse, Branford, CT (US); John P. Alsobrook II, Madison, CT (US); Denise M. Lepley, Branford, CT (US); Danier K. Rieger, Branford, CT (US); Catherine E. Burgess, Wethersfield, CT (US); Stacie J. Casman, North Haven, CT (US); Kimberly A. Spytek, New Haven, CT (US); Ference L. Boldog, North Haven, CT (US); Li Li, Branford, CT (US); Muralidhara Padigaru, Branford, CT (US); Vishnu Mishra, Gainesville, FL (US); Meera Patturajan, Branford, CT (US); Suresh G. Shenoy, Branford, CT (US); Luca Rastelli, Guilford, CT (US); Velizar T. Tchernev, Branford, CT (US); Corine A.M. Vernet, Branford, CT (US); Bryan D. Zerhusen, Branford, CT (US); Uriel M. Malyankar, Branford, CT (US); Xiaojia (Sasha) Guo, Branford, CT (US); Charles E. Miller, Guilford, CT (US); Esha A. Gangolli, Madison, CT (US); Michael Grosse, (US)

Correspondence Address: MINTZ, LEVIN, COHN, FERRIS,, GLOVSKY AND POPEO, P.C., One Financial Center, Boston, MA, 02111, US

(21) Appl. No.: 10/218,779

(22) Filed: Aug. 14, 2002

Related U.S. Application Data
(63) Continuation of application No. 09/995,514, filed on Nov. 28, 2001, now abandoned.
(60) Provisional application No. 60/253,834, filed on Nov. 29, 2000.
(60) Provisional application No. 60/250,926, filed on Nov. 30, 2000.
(60) Provisional application No. 60/264,180, filed on Jan. 25, 2001.
(60) Provisional application No. 60/313,656, filed on Aug. 20, 2001.
(60) Provisional application No. 60/327,456, filed on Oct. 5, 2001.

(51) Int. Cl. C12Q 1/68; G01N 33/574; C07H 21/04; C12N 9/00; C12P 21/02; C12N 5/06; C07K 14/47; C07K 16/30

(52) U.S. Cl. 435/69.1; 435/183; 435/320.1; 435/325; 530/350; 536/23.2; 530/388.1; 435/7.23; 435/6

(57) ABSTRACT

Disclosed herein are nucleic acid sequences that encode novel polypeptides. Also disclosed are polypeptides encoded by these nucleic acid sequences, and antibodies, which immunospecifically-bind to the polypeptide, as well as derivatives, variants, mutants, or fragments of the aforementioned polypeptide, polynucleotide, or antibody. The invention further discloses therapeutic, diagnostic and research methods for diagnosis, treatment, and prevention of disorders involving any one of these novel human nucleic acids and proteins.

### RELATED APPLICATIONS

[0001] This application claims priority to U.S. Ser. No. 09/995,514, filed Nov. 28, 2001, pending, which claims the benefit of U.S. Ser. No. 60/253,834, filed Nov. 29, 2000, abandoned; U.S. Ser. No. 60/250,926, filed Nov. 30, 2000, abandoned; U.S. Ser. No. 60/264,180, filed Jan. 25, 2001, abandoned; U.S. Ser. No. 60/313,656, filed Aug. 20, 2001, pending; and U.S. Ser. No. 60/327,456, filed Oct. 5, 2001, pending; each of which is incorporated by reference in its entirety.

### FIELD OF THE INVENTION

[0002] The invention generally relates to nucleic acids and polypeptides encoded thereby.

### BACKGROUND OF THE INVENTION

[0003] The invention generally relates to nucleic acids and polypeptides encoded therefrom. More specifically, the invention relates to nucleic acids encoding cytoplasmic, nuclear, membrane bound, and secreted polypeptides, as well as vectors, host cells, antibodies, and recombinant methods for producing these nucleic acids and polypeptides.

### SUMMARY OF THE INVENTION

[0004] The invention is based in part upon the discovery of nucleic acid sequences encoding novel polypeptides. The novel nucleic acids and polypeptides are referred to herein as NOVX, or NOV1, NOV2, NOV3, NOV4, NOV5, NOV6, NOV7, NOV8, NOV9, NOV10, NOV11, and NOV12 nucleic acids and polypeptides. These nucleic acids and polypeptides, as well as derivatives, homologs, analogs and fragments thereof, will hereinafter be collectively designated as “NOVX” nucleic acid or polypeptide sequences.

[0005] In one aspect, the invention provides an isolated NOVX nucleic acid molecule encoding a NOVX polypeptide that includes a nucleic acid sequence that has identity to the nucleic acids disclosed in SEQ ID NOS: 1, 3, 5, 7, 9, 11, 13, 15, 17, 19, 21, 23, 25, 27, 29, and 31. In some embodiments, the NOVX nucleic acid molecule will hybridize under stringent conditions to a nucleic acid sequence complementary to a nucleic acid molecule that includes a protein-coding sequence of a NOVX nucleic acid sequence. The invention also includes an isolated nucleic acid that encodes a NOVX polypeptide, or a fragment, homolog, analog or derivative thereof. For example, the nucleic acid can encode a polypeptide at least 80% identical to a polypeptide comprising the amino acid sequences of SEQ ID NOS: 2, 4, 6, 8, 10, 12, 14, 16, 18, 20, 22, 24, 26, 28, 30, and 32. The nucleic acid can be, for example, a genomic DNA fragment or a cDNA molecule that includes the nucleic acid sequence of any of SEQ ID NOS: 1, 3, 5, 7, 9, 11, 13, 15, 17, 19, 21, 23, 25, 27, 29,and31.

[0006] Also included in the invention is an oligonucleotide, e.g., an oligonucleotide which includes at least 6 contiguous nucleotides of a NOVX nucleic acid (e.g., SEQ ID NOS: 1, 3, 5, 7, 9, 11, 13, 15, 17, 19, 21, 23, 25, 27, 29, and 31) or a complement of said oligonucleotide.

[0007] Also included in the invention are substantially purified NOVX polypeptides (SEQ ID NOS: 2, 4, 6, 8, 10, 12, 14, 16, 18, 20, 22, 24, 26, 28, 30, and 32). In certain embodiments, the NOVX polypeptides include an amino acid sequence that is substantially identical to the amino acid sequence of a human NOVX polypeptide.

[0008] The invention also features antibodies that immunoselectively bind to NOVX polypeptides, or fragments, homologs, analogs or derivatives thereof.

[0009] In another aspect, the invention includes pharmaceutical compositions that include therapeutically- or prophylactically-effective amounts of a therapeutic and a pharmaceutically-acceptable carrier. The therapeutic can be, e.g., a NOVX nucleic acid, a NOVX polypeptide, or an antibody specific for a NOVX polypeptide. In a further aspect, the invention includes, in one or more containers, a therapeutically- or prophylactically-effective amount of this pharmaceutical composition.

[0010] In a further aspect, the invention includes a method of producing a polypeptide by culturing a cell that includes a NOVX nucleic acid, under conditions allowing for expression of the NOVX polypeptide encoded by the DNA. If desired, the NOVX polypeptide can then be recovered.

[0011] In another aspect, the invention includes a method of detecting the presence of a NOVX polypeptide in a sample. In the method, a sample is contacted with a compound that selectively binds to the polypeptide under conditions allowing for formation of a complex between the polypeptide and the compound. The complex is detected, if present, thereby identifying the NOVX polypeptide within the sample.

[0012] The invention also includes methods to identify specific cell or tissue types based on their expression of a NOVX.

[0013] Also included in the invention is a method of detecting the presence of a NOVX nucleic acid molecule in a sample by contacting the sample with a NOVX nucleic acid probe or primer, and detecting whether the nucleic acid probe or primer bound to a NOVX nucleic acid molecule in the sample.

[0014] In a further aspect, the invention provides a method for modulating the activity of a NOVX polypeptide by contacting a cell sample that includes the NOVX polypeptide with a compound that binds to the NOVX polypeptide in an amount sufficient to modulate the activity of said polypeptide. The compound can be, e.g., a small molecule, such as a nucleic acid, peptide, polypeptide, peptidomimetic, carbohydrate, lipid or other organic (carbon containing) or inorganic molecule, as further described herein.

[0015] Also within the scope of the invention is the use of a therapeutic in the manufacture of a medicament for treating or preventing disorders or syndromes including, e.g., cardiomyopathy, atherosclerosis, hypertension, congenital heart defects, aortic stenosis, atrial septal defect (ASD), atrioventricular (A-V) canal defect, ductus arteriosus, pulmonary stenosis, subaortic stenosis, ventricular septal defect (VSD), valve diseases, hypercoagulation, hemophilia, idiopathic thrombocytopenic purpura, heart failure, secondary pathologies caused by heart failure and hypertension, hypotension, angina pectoris, myocardial infarction, tuberous sclerosis, scleroderma, transplantation, autoimmune disease, lupus erythematosus, viral/bacterial/parasitic infections, multiple sclerosis, autoimmume disease, allergies, immunodeficiencies, graft versus host disease, asthma, emphysema, ARDS, inflammation and modulation of the immune response, viral pathogenesis, aging-related disorders, Th1 inflammatory diseases such as rheumatoid arthritis, multiple sclerosis, inflammatory bowel diseases, AIDS, wound repair, obesity, diabetes, endocrine disorders, anorexia, bulimia, renal artery stenosis, interstitial nephritis, glomerulonephritis, polycystic kidney disease, systemic, renal tubular acidosis, IgA nephropathy, nephrological disesases, hypercalceimia, Lesch-Nyhan syndrome, Von Hippel-Lindau (VHL) syndrome, trauma, regeneration (in vitro and in vivo), Hirschsprung's disease , Crohn's Disease, appendicitis, endometriosis, laryngitis, psoriasis, actinic keratosis, acne, hair growth/loss, allopecia, pigmentation disorders, myasthenia gravis, alpha-mannosidosis, beta-mannosidosis, other storage disorders, peroxisomal disorders such as zellweger syndrome, infantile refsum disease, rhizomelic chondrodysplasia (chondrodysplasia punctata, rhizomelic), and hyperpipecolic acidemia, osteoporosis, muscle disorders, urinary retention, Albright Hereditary Ostoeodystrophy, ulcers, Alzheimer's disease, stroke, Parkinson's disease, Huntington's disease, cerebral palsy, epilepsy, Lesch-Nyhan syndrome, multiple sclerosis, ataxia-telangiectasia, behavioral disorders, addiction, anxiety, pain, neuroprotection, Stroke, Aphakia, neurodegenerative disorders, neurologic disorders, developmental defects, conditions associated with the role of GRK2 in brain and in the regulation of chemokine receptors, encephalomyelitis, anxiety, schizophrenia, manic depression, delirium, dementia, severe mental retardation and dyskinesias, Gilles de la Tourette syndrome, leukodystrophies, cancers, breast cancer, CNS cancer, colon cancer, gastric cancer, lung cancer, melanoma, ovarian cancer, pancreatic cancer, kidney cancer, colon cancer, prostate cancer, neuroblastoma, and cervical cancer, Neoplasm; adenocarcinoma, lymphoma; uterus cancer, benign prostatic hypertrophy, fertility, control of growth and development/differentiation related functions such as but not limited maturation, lactation and puberty, reproductive malfunction, and/or other pathologies and disorders of the like.

[0016] The therapeutic can be, e.g., a NOVX nucleic acid, a NOVX polypeptide, or a NOVX-specific antibody, or biologically-active derivatives or fragments thereof.

[0017] For example, the compositions of the present invention will have efficacy for treatment of patients suffering from the diseases and disorders disclosed above and/or other pathologies and disorders of the like. The polypeptides can be used as immunogens to produce antibodies specific for the invention, and as vaccines. They can also be used to screen for potential agonist and antagonist compounds. For example, a cDNA encoding NOVX may be useful in gene therapy, and NOVX may be useful when administered to a subject in need thereof. By way of non-limiting example, the compositions of the present invention will have efficacy for treatment of patients suffering from the diseases and disorders disclosed above and/or other pathologies and disorders of the like.

[0018] The invention further includes a method for screening for a modulator of disorders or syndromes including, e.g., the diseases and disorders disclosed above and/or other pathologies and disorders of the like. The method includes contacting a test compound with a NOVX polypeptide and determining if the test compound binds to said NOVX polypeptide. Binding of the test compound to the NOVX polypeptide indicates the test compound is a modulator of activity, or of latency or predisposition to the aforementioned disorders or syndromes.

[0019] Also within the scope of the invention is a method for screening for a modulator of activity, or of latency or predisposition to disorders or syndromes including, e.g., the diseases and disorders disclosed above and/or other pathologies and disorders of the like by administering a test compound to a test animal at increased risk for the aforementioned disorders or syndromes. The test animal expresses a recombinant polypeptide encoded by a NOVX nucleic acid. Expression or activity of NOVX polypeptide is then measured in the test animal, as is expression or activity of the protein in a control animal which recombinantly-expresses NOVX polypeptide and is not at increased risk for the disorder or syndrome. Next, the expression of NOVX polypeptide in both the test animal and the control animal is compared. A change in the activity of NOVX polypeptide in the test animal relative to the control animal indicates the test compound is a modulator of latency of the disorder or syndrome.

[0020] In yet another aspect, the invention includes a method for determining the presence of or predisposition to a disease associated with altered levels of a NOVX polypeptide, a NOVX nucleic acid, or both, in a subject (e.g., a human subject). The method includes measuring the amount of the NOVX polypeptide in a test sample from the subject and comparing the amount of the polypeptide in the test sample to the amount of the NOVX polypeptide present in a control sample. An alteration in the level of the NOVX polypeptide in the test sample as compared to the control sample indicates the presence of or predisposition to a disease in the subject. Preferably, the predisposition includes, e.g., the diseases and disorders disclosed above and/or other pathologies and disorders of the like. Also, the expression levels of the new polypeptides of the invention can be used in a method to screen for various cancers as well as to determine the stage of cancers.

[0021] In a further aspect, the invention includes a method of treating or preventing a pathological condition associated with a disorder in a mammal by administering to the subject a NOVX polypeptide, a NOVX nucleic acid, or a NOVX-specific antibody to a subject (e.g., a human subject), in an amount sufficient to alleviate or prevent the pathological condition. In preferred embodiments, the disorder, includes, e.g., the diseases and disorders disclosed above and/or other pathologies and disorders of the like.

[0022] In yet another aspect, the invention can be used in a method to identity the cellular receptors and downstream effectors of the invention by any one of a number of techniques commonly employed in the art. These include but are not limited to the two-hybrid system, affinity purification, co-precipitation with antibodies or other specific-interacting molecules.

[0023] Unless otherwise defined, all technical and scientific terms used herein have the same meaning as commonly understood by one of ordinary skill in the art to which this invention belongs. Although methods and materials similar or equivalent to those described herein can be used in the practice or testing of the present invention, suitable methods and materials are described below. All publications, patent applications, patents, and other references mentioned herein are incorporated by reference in their entirety. In the case of conflict, the present specification, including definitions, will control. In addition, the materials, methods, and examples are illustrative only and not intended to be limiting.

[0024] Other features and advantages of the invention will be apparent from the following detailed description and claims.

### DETAILED DESCRIPTION OF THE INVENTION

[0025] The present invention provides novel nucleotides and polypeptides encoded thereby. Included in the invention are the novel nucleic acid sequences and their encoded polypeptides. The sequences are collectively referred to herein as “NOVX nucleic acids” or “NOVX polynucleotides” and the corresponding encoded polypeptides are referred to as “NOVX polypeptides” or “NOVX proteins.” Unless indicated otherwise, “NOVX” is meant to refer to any of the novel sequences disclosed herein. Table A provides a summary of the NOVX nucleic acids and their encoded polypeptides.

TABLE A
Sequences and Corresponding SEQ ID Numbers

| | | SEQ ID | | |
|---|---|---|---|---|
| | | NO | | |
| NOVX | | (nucleic | SEQ ID NO | |
| Assignment | Internal Identification | acid) | (polypeptide) | Homology |
| 1a | GMba58o1_A_da1 | 1 | 2 | Transmembrane receptor |
| | | | | UNC5H2-like |
| 1b | Gmba58o1_A | 3 | 4 | Transmembrane receptor |
| | | | | UNC5H2-like |
| 2a | SC126422078_A | 5 | 6 | Tyrosine Phosphatase |
| | | | | Precursor-like |
| 2b | CG50718-02 | 7 | 8 | Glomerular Mesangial Cell |
| | | | | Receptor Protein Tyrosine |
| | | | | Phosphatase Precursor like |
| 2c | CG50718-05 | 9 | 10 | Glomerular Mesangial Cell |
| | | | | Receptor Protein Tyrosine |
| | | | | Phosphatase Precursor like |
| 3 | 134899552_EXT | 11 | 12 | Human homolog of the |
| | | | | Drosophila pecanex-like |
| 4 | SC140515441_A | 13 | 14 | Aurora-related kinase 1- |
| | | | | like |
| 5 | SC44326718_A | 15 | 16 | 26S protease regulatory |
| | | | | subunit 4-like |
| 6 | GMAC073364_Ada1 | 17 | 18 | Mitsugumin29-like |
| 7 | 106973211_EXT | 19 | 20 | Wnt-15-like |
| 8 | 88091010-EXT | 21 | 22 | Wnt-14-like |
| 9 | AC069250_28_da1 | 23 | 24 | Beta-adrenergic receptor |
| | | | | kinase-like |
| 10 | AC058790_da25 | 25 | 26 | Alpha-mannosidase-like |
| 11a | GM57107065_da1 | 27 | 28 | C1q-related factor-like |
| 11b | CG54503-02 | 29 | 30 | C1q-related factor-like |
| 12 | SC132340676_A | 31 | 32 | Plexin 1-like |

[0026] NOVX nucleic acids and their encoded polypeptides are useful in a variety of applications and contexts. The various NOVX nucleic acids and polypeptides according to the invention are useful as novel members of the protein families according to the presence of domains and sequence relatedness to previously described proteins. Additionally, NOVX nucleic acids and polypeptides can also be used to identify proteins that are members of the family to which the NOVX polypeptides belong.

[0027] NOV1 is homologous to the transmembrane receptor UNC5H2-like family of proteins. Thus, NOV1 nucleic acids and polypeptides, antibodies and related compounds according to the invention will be useful in therapeutic and diagnostic applications implicated in, for example; cardiomyopathy, atherosclerosis, hypertension, congenital heart defects, aortic stenosis, atrial septal defect (ASD), atrioventricular (A-V) canal defect, ductus arteriosus, pulmonary stenosis, subaortic stenosis, ventricular septal defect (VSD), valve diseases, tuberous sclerosis, scleroderma, obesity, transplantation, diabetes, autoimmune disease, renal artery stenosis, interstitial nephritis, glomerulonephritis, polycystic kidney disease, systemic lupus erythematosus, renal tubular acidosis, IgA nephropathy, hypercalceimia, Lesch-Nyhan syndrome, Von Hippel-Lindau (VHL) syndrome, Alzheimer's disease, stroke, tuberous sclerosis, Parkinson's disease, Huntington's disease, cerebral palsy, epilepsy, Lesch-Nyhan syndrome, multiple sclerosis, ataxia-telangiectasia, leukodystrophies, behavioral disorders, addiction, anxiety, pain, neuroprotection, cancers, and/or other pathologies and disorders. Also since this gene is expressed at a measurably higher level in several cancer cell lines (including breast cancer, CNS cancer, colon cancer, gastric cancer, lung cancer, melanoma, ovarian cancer and pancreatic cancer), it may be useful in diagnosis and treatment of these cancers.

[0028] NOV2 is homologous to the protein tyrosine phosphatase precursor-like family of proteins. Thus NOV2 nucleic acids, polypeptides, antibodies and related compounds according to the invention will be useful in therapeutic and diagnostic applications implicated in, for example; cancer, kidney cancer, trauma, regeneration (in vitro and in vivo), viral/bacterial/parasitic infections, nephrological disesases including diabetes, autoimmune disease, renal artery stenosis, interstitial nephritis, glomerulonephritis, polycystic kidney disease, systemic lupus erythematosus, renal tubular acidosis, IgA nephropathy, hypercalceimia, Lesch-Nyhan syndrome, Hirschsprung's disease, Crohn's Disease, appendicitis, and/or other pathologies and disorders.

[0029] NOV3 is homologous to the Human homolog of the Drosophila pecanex family of proteins. Thus NOV3 nucleic acids, polypeptides, antibodies and related compounds according to the invention will be useful in therapeutic and diagnostic applications implicated in, for example; cancer,trauma, regeneration (in vitro and in vivo), viral/bacterial/parasitic infections, cardiomyopathy, atherosclerosis, hypertension, congenital heart defects, aortic stenosis, atrial septal defect (ASD), atrioventricular (A-V) canal defect, ductus arteriosus, pulmonary stenosis, subaortic stenosis, ventricular septal defect (VSD), valve diseases, tuberous sclerosis, multiple sclerosis, scleroderma, obesity, endometriosis, fertility, hypercoagulation, autoimmume disease, allergies, immunodeficiencies, transplantation, hemophilia, idiopathic thrombocytopenic purpura, graft versus host disease, Von Hippel- Lindau (VHL) syndrome, Alzheimer's disease, stroke, hypercalceimia, Parkinson's disease, Huntington's disease, cerebral palsy, epilepsy, ataxia-telangiectasia, leukodystrophies, behavioral disorders, addiction, anxiety, pain, neuroprotection, systemic lupus erythematosus, asthma, emphysema, ARDS, laryngitis, psoriasis, actinic keratosis, acne, hair growth/loss, allopecia, pigmentation disorders, endocrine disorders, diabetes, renal artery stenosis, interstitial nephritis, glomerulonephritis, polycystic kidney disease, systemic lupus erythematosus, renal tubular acidosis, IgA nephropathy, Lesch-Nyhan syndrome, and a variety of kidney diseases and/or other pathologies and disorders.

[0030] NOV4 is homologous to a family of Aurora-related kinase 1-like proteins. Thus, the NOV4 nucleic acids and polypeptides, antibodies and related compounds according to the invention will be useful in therapeutic and diagnostic applications implicated in, for example: breast, ovarian, colon, prostate, neuroblastoma, and cervical cancer, Cardiomyopathy, Atherosclerosis, Hypertension, Congenital heart defects, Aortic stenosis, Atrial septal defect (ASD), Atrioventricular (A-V) canal defect, Ductus arteriosus, Pulmonary stenosis, Subaortic stenosis, Ventricular septal defect (VSD), valve diseases, Tuberous sclerosis, Scleroderma, Obesity, Transplantation, Diabetes, Von Hippel-Lindau (VHL) syndrome, Pancreatitis, Alzheimer's disease, Stroke, hypercalceimia, Parkinson's disease, Huntington's disease, Cerebral palsy, Epilepsy, Lesch-Nyhan syndrome, Multiple sclerosis, Ataxia-telangiectasia, Leukodystrophies, Behavioral disorders, Addiction, Anxiety, Pain, and Neuroprotection, and/or other pathologies.

[0031] NOV5 is homologous to the 26S protease regulatory subunit 4-like family of proteins. Thus, NOV5 nucleic acids, polypeptides, antibodies and related compounds according to the invention will be useful in therapeutic and diagnostic applications implicated in, for example: cataract and Aphakia, Alzheimer's disease, neurodegenerative disorders, inflammation and modulation of the immune response, viral pathogenesis, aging-related disorders, neurologic disorders, cancer, and/or other pathologies.

[0032] NOV6 is homologous to the MITSUGUMIN29-like family of proteins. Thus, NOV6 nucleic acids, polypeptides, antibodies and related compounds according to the invention will be useful in therapeutic and diagnostic applications implicated in, for example: muscular dystrophy, Lesch-Nyhan syndrome, myasthenia gravis, diabetes, autoimmune disease, renal artery stenosis, interstitial nephritis, glomerulonephritis, polycystic kidney disease, systemic lupus erythematosus, renal tubular acidosis, IgA nephropathy, hypercalceimia, cardiomyopathy, atherosclerosis, hypertension, congenital heart defects, aortic stenosis, atrial septal defect (ASD), atrioventricular (A-V) canal defect, ductus arteriosus, pulmonary stenosis, subaortic stenosis, ventricular septal defect (VSD), valve diseases, tuberous sclerosis, scleroderma, obesity, transplantation, adrenoleukodystrophy, congenital adrenal hyperplasia, and other diseases, disorders and conditions of the like. Also since the invention is highly expressed in one of the lung cancer cell lines (Lung cancer NCI-H522 ), it may be useful in diagnosis and treatment of this cancer.

[0033] NOV7 is homologous to the Wnt-15-like family of proteins. Thus NOV7 nucleic acids, polypeptides, antibodies and related compounds according to the invention will be useful in Von Hippel-Lindau (VHL) syndrome, Alzheimer's disease, stroke, tuberous sclerosis, hypercalceimia, Parkinson's disease, Huntington's disease, cerebral palsy, epilepsy, Lesch-Nyhan syndrome, multiple sclerosis, ataxia-telangiectasia, leukodystrophies, behavioral disorders, addiction, anxiety, pain, neurodegeneration, cancer, developmental defects, and/or other pathologies/disorders.

[0034] NOV8 is homologous to members of the Wnt-14-like family of proteins. Thus, the NOV8 nucleic acids, polypeptides, antibodies and related compounds according to the invention will be useful in therapeutic and diagnostic applications implicated in, for example; Von Hippel-Lindau (VHL) syndrome, Alzheimer's disease, stroke, tuberous sclerosis, hypercalceimia, Parkinson's disease, Huntington's disease, cerebral palsy, epilepsy, Lesch-Nyhan syndrome, multiple sclerosis, ataxia-telangiectasia, leukodystrophies, behavioral disorders, addiction, anxiety, pain, neurodegeneration, cancer, developmental defects, and/or other pathologies/disorders.

[0035] NOV9 is homologous to the beta adrenergic receptor kinase-like family of proteins. Thus, NOV9 nucleic acids and polypeptides, antibodies and related compounds according to the invention will be useful in therapeutic and diagnostic applications implicated in, for example: heart failure, hypertension, secondary pathologies caused by heart failure and hypertension, and other diseases, disorders and conditions of the like. Additionally, the compositions of the present invention may have efficacy for treatment of patients suffering from conditions associated with the role of GRK2 in brain and in the regulation of chemokine receptors.

[0036] NOV10 is homologous to the alpha-mannosidase-like family of proteins. Thus, NOV10 nucleic acids and polypeptides, antibodies and related compounds according to the invention will be useful in therapeutic and diagnostic applications implicated in, for example: alpha-mannosidosis, beta-mannosidosis, other storage disorders, peroxisomal disorders such as zellweger syndrome, infantile refsum disease, rhizomelic chondrodysplasia (chondrodysplasia punctata, rhizomelic), and hyperpipecolic acidemia and other diseases, disorders and conditions of the like, and/or other pathologies/disorders.

[0037] NOV11 is homologous to the C1q-related factor-like family of proteins. Thus, NOV11 nucleic acids and polypeptides, antibodies and related compounds according to the invention will be useful in therapeutic and diagnostic applications implicated in, for example: Th1 inflammatory diseases such as rheumatoid arthritis, multiple sclerosis, inflammatory bowel diseases and psoriasis, lupus erythematosus and glomerulonephritis, control of growh and development/differentiation related functions such as but not limited maturation, lactation and puberty, osteoporosis, obesity, aging and reproductive malfunction and hence could be used in treatment and/or diagnosis of these disorders.

[0038] NOV12 is homologous to the Plexin-1 like family of proteins. Thus, NOV12 nucleic acids and polypeptides, antibodies, and related compounds according to the invention will be useful in therapeutic and diagnostic applications implicated in, for example: AIDS, cancer therapy, treatment of Neurologic diseases, Brain and/or autoimmune disorders like encephalomyelitis, neurodegenerative disorders, Alzheimer's Disease, Parkinson's Disorder, immune disorders, and hematopoietic disorders, endocrine diseases, muscle disorders, inflammation and wound repair, bacterial, fungal, protozoal and viral infections (particularly infections caused by HIV-1 or HIV-2), pain, cancer (including but not limited to Neoplasm; adenocarcinoma; lymphoma; prostate cancer; uterus cancer), anorexia, bulimia, asthma, Parkinson's disease, acute heart failure, hypotension, hypertension, urinary retention, osteoporosis, Crohn's disease; multiple sclerosis; and Treatment of Albright Hereditary Ostoeodystrophy, angina pectoris, myocardial infarction, ulcers, asthma, allergies, benign prostatic hypertrophy, and psychotic and neurological disorders, including anxiety, schizophrenia, manic depression, delirium, dementia, severe mental retardation and dyskinesias, such as Huntington's disease or Gilles de la Tourette syndrome, and/or other pathologies/disorders.

[0039] The NOVX nucleic acids and polypeptides can also be used to screen for molecules, which inhibit or enhance NOVX activity or function. Specifically, the nucleic acids and polypeptides according to the invention may be used as targets for the identification of small molecules that modulate or inhibit, e.g., neurogenesis, cell differentiation, cell proliferation, hematopoiesis, wound healing and angiogenesis.

[0040] Additional utilities for the NOVX nucleic acids and polypeptides according to the invention are disclosed herein.

[0041] NOV1

[0042] NOV1 includes three novel transmembrane receptor UNC5H2-like proteins disclosed below. The disclosed sequences have been named NOV1a and NOV1b.

[0043] NOV1a

[0044] A disclosed NOV1a nucleic acid of 2860 nucleotides (also referred to as GMba58o1_A_da1) encoding a transmembrane receptor UNC5H2-like protein is shown in Table 1A. An open reading frame was identified beginning with an ATG initiation codon at nucleotides 59-61 and ending with a TGA codon at nucleotides 2858-2860. A putative untranslated region upstream from the initiation codon and downstream from the termination codon is underlined in Table 1A. The start and stop codons are in bold letters.

TABLE 1A
NOV1a nucleotide sequence.

(SEQ ID NO:1)

AGACTGGGGCCAGGGAGACAGCCCTGGGGGAGAGGCGCCCGAACCAGGCCGCGGGAGCATGGGGGCCCGGAG
CGGAGCTCGGGGCGCGCTGCTGCTGGCACTGCTGCTCTGCTGGGACCCGAGGCTGAGCCAAGCAGGCACTGA
TTCTGGCAGCGAGGTGCTCCCTGACTCCTTCCCGTCAGCGCCAGCAGAGCCGCTGCCCTACTTCCTGCAGGA
GCCACAGGACGCCTACATTGTGAAGAACAAGCCTGTGGAGCTCCGCTGCCGCGCCTTCCCCGCCACACAGAT
CTACTTCAAGTGCAACGGCGAGTGGGTCAGCCAGAACGACCACGTCACACAGGAAGGCCTGGATGAGGCCAC
CGGTCTGCGGGTGCGCGAGGTGCAGATCGAGGTGTCGCGGCAGCAGGTGGAGGAGCTCTTTGGGCTGGAGGA
TTACTGGTGCCAGTGCGTGGCCTGGAGCTCCGCGGGCACCACCAAGAGTCGCCGAGCCTACGTCCGCATCGC
CTACCTGCGCAAGAACTTCGATCAGGAGCCTCTGGGCAAGGAGGTGCCCCTGGACCATGAGGTTCTCCTGCA
GTGCCGCCCGCCGGAGGGGGTGCCTGTGGCCGAGGTGGAATGGCTCAAGAATGAGGATGTCATCGACCCCAC
CCAGGACACCAACTTCCTGCTCACCATCGACCACAACCTCATCATCCGCCAGGCCCGCCTGTCGGACACTGC
CAACTATACCTGCGTGGCCAAGAACATCGTGGCCAAACGCCGGAGCACCACTGCCACCGTCATCGTCTACGT
GAATGGCGGCTGGTCCAGCTGGGCAGAGTGGTCACCCTGCTCCAACCGCTGTGGCCGAGGCTGGCAGAAGCG
CACCCGGACCTGCACCAACCCCGCTCCACTCAACGGAGGGGCCTTCTGCGAGGGCCAGGCATTCCAGAAGAC
CGCCTGCACCACCATCTGCCCAGTCGATGGGGCGTGGACGGAGTGGAGCAAGTGGTCAGCCTGCAGCACTGA
GTGTGCCCACTGGCGTAGCCGCGAGTGCATGGCGCCCCCACCCCAGAACGGAGGCCGTGACTGCAGCGGGAC
GCTGCTCGACTCTAAGAACTGCACAGATGGGCTGTGCATGCAACTGGAGGCCTCAGGGGATGCGGCGCTGTA
TGCGGGGCTCGTGGTGGCCATCTTCGTGGTCGTGGCAATCCTCATGGCGGTGGGGGTGGTGGTGTACCGCCG
CAACTGCCGTGACTTCGACACAGACATCACTGACTCATCTGCTGCCCTGACTGGTGGTTTCCACCCCGTCAA
CTTTAAGACGGCAAGGCCCAGTAACCCGCAGCTCCTACACCCCTCTGTGCCTCCTGACCTGACAGCCAGCGC
CGGCATCTACCGCGGACCCGTGTATGCCCTGCAGGACTCCACCGACAAAATCCCCATGACCAACTCTCCTCT
GCTGGACCCCTTACCCAGCCTTAAGGTCAAGGTCTACAGCTCCAGCACCACGGGCTCTGGGCCAGGCCTGGC
AGATGGGGCTGACCTGCTGGCGGTCTTGCCGCCTGGCACATACCCTAGCGATTTCGCCCGGGACACCCACTT
CCTGCACCTGCGCAGCGCCAGCCTCGGTTCCCAGCAGCTCTTGGGCCTGCCCCGAGACCCAGGGAGCAGCGT
CAGCGGCACCTTTGGCTGCCTGGGTGGGAGGCTCAGCATCCCCGGCACAGGGGTCAGCTTGCTGGTGCCCAA
TGGAGCCATTCCCCAGGGCAAGTTCTACGAGATGTATCTACTCATCAACAAGGCAGAAAGTACCCTGCCGCT
TTCAGAAGGGACCCAGACAGTATTGAGCCCCTCGGTGACCTGTGGACCCACAGGCCTCCTGCTGTGCCGCCC
CGTCATCCTCACCATGCCCCACTGTGCCGAAGTCAGTGCCCGTGACTGGATCTTTCAGCTCAAGACCCAGGC
CCACCAGGGCCACTGGGAGGAGGTGGTGACCCTGGATGAGGAGACCCTGAACACACCCTGCTACTGCCAGCT
GGAGCCCAGGGCCTGTCACATCCTGCTGGACCAGCTGGGCACCTACGTGTTCACGGGCGAGTCCTATTCCCG
CTCAGCAGTCAAGCGGCTCCAGCTGGCCGTCTTCGCCCCCGCCCTCTGCACCTCCCTGGAGTACAGCCTCCG
GGTCTACTGCCTGGAGGACACGCCTGTAGCACTGAAGGAGGTGCTGGAGCTCGAGCGGACTCTGGGCGGATA
CTTGGTGGAGGAGCCGAAACCGCTAATGTTCAAGGACAGTTACCACAACCTGCGCCTCTCCCTCCATGACCT
CCCCCATGCCCATTGGAGGAGCAAGCTGCTGGCCAAATACCAGGAGATCCCCTTCTATCACATTTGGAGTGG
CAGCCAGAAGGCCCTCCACTGCACTTTCACCCTGGAGAGGCACAGCTTGGCCTCCACAGAGCTCACCTGCAA
GATCTGCGTGCGGCAAGTGGAAGGGGAGGGCCAGATATTCCAGCTGCATACCACTCTGGCAGAGACACCTGC
TGGCTCCCTGGACACTCTCTGCTCTGCCCCTGGCAGCACTGTCACCACCCAGCTGGGACCTTATGCCTTCAA
GATCCCACTGTCCATCCGCCAGAAGATATGCAACAGCCTAGATGCCCCCAACTCACGGGGCAATGACTGGCG
GATGTTAGCACAGAAGCTCTCTATGGACCGGTACCTGAATTACTTTGCCACCAAAGCGAGCCCCACGGGTGT
GATCCTGGACCTCTGGGAAGCTCTGCAGCAGGACGATGGGGACCTCAACAGCCTGGCGAGTGCCTTGGAGGA
GATGGGCAAGAGTGAGATGCTGGTGGCTGTGGCCACCGACGGGGACTGCTGA

[0045] In a search of public sequence databases, the NOV1a nucleic acid sequence, located on chromsome 10 has 1604 of 1895 bases (84%) identical to a transmembrane receptor UNC5H2 mRNA from Rattus Norvegicus, (GENBANK-ID: RNU87306). Public nucleotide databases include all GenBank databases and the GeneSeq patent database.

[0046] In all BLAST alignments herein, the “E-value” or “Expect” value is a numeric indication of the probability that the aligned sequences could have achieved their similarity to the BLAST query sequence by chance alone, within the database that was searched. For example, the probability that the subject (“Sbjct”) retrieved from the NOV1a BLAST analysis, e.g., transmembrane receptor UNC5H2 mRNA from Rattus Norvegicus, matched the Query NOV1a sequence purely by chance is 0.0. The Expect value (E) is a parameter that describes the number of hits one can “expect” to see just by chance when searching a database of a particular size. It decreases exponentially with the Score (S) that is assigned to a match between two sequences. Essentially, the E value describes the random background noise that exists for matches between sequences.

[0047] The Expect value is used as a convenient way to create a significance threshold for reporting results. The default value used for blasting is typically set to 0.0001. In BLAST 2.0, the Expect value is also used instead of the P value (probability) to report the significance of matches. For example, an E value of one assigned to a hit can be interpreted as meaning that in a database of the current size one might expect to see one match with a similar score simply by chance. An E value of zero means that one would not expect to see any matches with a similar score simply by chance. See, e.g., http://www.ncbi.nlm.nih.gov/Education/BLASTinfo/. Occasionally, a string of X's or N's will result from a BLAST search. This is a result of automatic filtering of the query for low-complexity sequence that is performed to prevent artifactual hits. The filter substitutes any low-complexity sequence that it finds with the letter “N” in nucleotide sequence (e.g., “NNNNNNNNNNNNN”) or the letter “X” in protein sequences (e.g., “XXXXXXXXX”). Low-complexity regions can result in high scores that reflect compositional bias rather than significant position-by-position alignment. (Wootton and Federhen, Methods Enzymol 266:554-571, 1996).

[0048] The disclosed NOV1a polypeptide (SEQ ID NO: 2) encoded by SEQ ID NO: 1 has 933 amino acid residues and is presented in Table 1B using the one-letter amino acid code. Signal P, Psort and/or Hydropathy results predict that NOV1a has a signal peptide at the first 26 amino acids and is likely to be localized at the plasma membrane with a certainty of 0.5140. In other embodiments, NOV1a is likely to be localized to the microbody (peroxisome) with a certainty of 0.1064, to the endoplasmic reticulum (membrane) with a certainty of 0.1000, or to the endoplasmic reticulum (lumen) with a certainty of 0.1000. The most likely cleavage site for NOV1a is between positions 26 and 27: SQA-GT

TABLE 1B
Encoded NOV1a protein sequence.

(SEQ ID NO:2)

MGARSGARGALLLALLLCWDPRLSQAGTDSGSEVLPDSFPSAPAEPLPYFLQEPQDAYIVKNKPVELRCRAF
PATQIYFKCNGEWVSQNDHVTQEGLDEATGLRVREVQIEVSRQQVEELFGLEDYWCQCVAWSSAGTTKSRRA
YVRIAYLRKNFDQEPLGKEVPLDHEVLLQCRPPEGVPVAEVEWLKNEDVIDPTQDTNFLLTIDHNLIIRQAR
LSDTANYTCVAKNIVAKRRSTTATVIVYVNGGWSSWAEWSPCSNRCGRGWQKRTRTCTNPAPLNGGAFCEGQ
AFQKTACTTICPVDGAWTEWSKWSACSTECAHWRSRECMAPPPQNGGRDCSGTLLDSKNCTDGLCMQLEASG
DAALYAGLVVAIFVVVAILMAVGVVVYRRNCRDFDTDITDSSAALTGGFHPVNFKTARPSNPQLLHPSVPPD
LTASAGIYRGPVYALQDSTDKIPMTNSPLLDPLPSLKVKVYSSSTTGSGPGLADGADLLGVLPPGTYPSDFA
RDTHFLHLRSASLGSQQLLGLPRDPGSSVSGTFGCLGGRLSIPGTGVSLLVPNGAIPQGKFYEMYLLINKAE
STLPLSEGTQTVLSPSVTCGPTGLLLCRPVILTMPHCAEVSARDWIFQLKTQAHQGHWEEVVTLDEETLNTP
CYCQLEPRACHILLDQLGTYVFTGESYSRSAVKRLQLAVFAPALCTSLEYSLRVYCLEDTPVALKEVLELER
TLGGYLVEEPKPLMFKDSYHNLRLSLHDLPHAHWRSKLLAKYQEIPFYHIWSGSQKALHCTFTLERHSLAST
ELTCKICVRQVEGEGQIFQLHTTLAETPAGSLDTLCSAPGSTVTTQLGPYAFKIPLSIRQKICNSLDAPNSR
GNDWRMLAQKLSMDRYLNYFATKASPTGVILDLWEALQQDDGDLNSLASALEEMGKSEMLVAVATDGDC

[0049] A search of sequence databases reveals that the NOV1a amino acid sequence has 862 of 945 amino acid residues (91%) identical to, and 897 of 945 amino acid residues (94%) similar to, the 945 amino acid residue 6330415E02RIK protein from Mus musculus (Q9D398) (E=0.0). Public amino acid databases include the GenBank databases, SwissProt, PDB and PIR.

[0050] NOV1a is at least expressed in endothelial cells, heart, kidney, adipose, brain (hippocampus), brain (thalamus), cerebral cortex, and the following cancer cell lines: breast cancer, CNS cancer, colon cancer, gastric cancer, lung cancer, melanoma, ovarian cancer and pancreatic cancer at a measurably higher level than the following tissues: adrenal gland, bladder, bone barrow, brain (amygdala), brain (cerebellum), brain (whole), breast, colorectal, liver, lung, lymph nod, mammary gland, ovary, pancreas, pituitary gland, placenta, prostate, salivary gland, skeletal muscle, small intestine, spinal cord, spleen, stomach, testis, thymus, thyroid gland, trachea, and uterus.

[0051] NOV1b

[0052] A disclosed NOV1b nucleic acid of 2860 nucleotides (also referred to as CG50126-02) encoding a novel beta-adrenergic receptor kinase-like protein is shown in Table 1C. An open reading frame was identified beginning with an ATG codon at nucleotides 59-61, and ending with a TGA codon at nucleotides 2858-2860. Putative untranslated regions, if any, are located upstream from the initiation codon and downstream from the termination codon.

TABLE 1C
NOV1b nucleotide sequence.

(SEQ ID NO:3)

AGACTGGGGCCAGGGAGACAGCCCTGGGGGAGAGGCGCCCGAACCAGGCCGCGGGAACATGGGGGCCCGGAGCGGAGCTC
GGGGCGCGCTGCTGCTGGCACTGCTGCTCTGCTGGGACCCGAGGCTGAGCCAAGCAGGCACTGATTCTGGCAGCGAGGTG
CTCCCTGACTCCTTCCCGTCAGCGCCAGCAGAGCCGCTGCCCTACTTCCTGCAGGAGCCACAGGACGCCTACATTGTGAA
GAACAAGCCTGTGGAGCTTCGCTGCCGCGCCTTCCCCGCCACACAGATCTACTTCAAGTGCAACGGCGAGTGGGTCAGCC
AGAACGACCACGTCACACAGGAAGGCCTGGATGAGGCCACCGGCCTGCGGGTGCGCGAGGTGCAGATCGAGGTGTCGCGG
CAGCAGGTGGAGGAGCTCTTTGGGCTGGAGGATTACTGGTGCCAGTGCGTGGCCTGGAGCTCCGCAGGCACCACCAAGAG
TCGCCGAGCCTACGTCCGCATCGCCTACCTGCGCAAGAACTTCGATCAGGAGCCTCTGGGCAAGGAGGTGCCCCTGGACC
ATGAGGTTCTCCTGCAGTGCCGCCCGCCGGAGGGGGTGCCTGTGGCCGAGGTGGAATGGCTCAAGAATGAGGATGTCATC
GACCCCACCCAGGACACCAACTTCCTGCTCACCATCGACCACAACCTCATCATCCGCCAGGCCCGCCTGTCGGACACTGC
CAACTATACCTGCGTGGCCAAGAACATCGTGGCCAAACGCCGGAGCACCACTGCCACCGTCATCGTCTACGTGAATGGCG
GCTGGTCCAGCTGGGCAGAGTGGTCACCCTGCTCCAACCGCTGTGGCCGAGGCTGGCAGAAGCGCACCCGGACCTGCACC
AACCCCGCTCCACTCAACGGAGGGGCCTTCTGCGAGGGCCAGGCATTCCAGAAGACCGCCTGCACCACCATCTGCCCAGT
CGATGGGGCGTGGACGGAGTGGAGCAAGTGGTCAGCCTGCAGCACTGAGTGTGCCCACTGGCGTAGCCGCGAGTGCATGG
CGCCCCCACCCCAGAACGGAGGCCGTGACTGCAGCGGGACGCTGCTCGACTCTAAGAACTGCACAGATGGGCTGTGCATG
CAACTGGAGGCCTCAGGGGATGCGGCGCTGTATGCGGGGCTCGTGGTGGCCATCTTCGTGGTCGTGGCAATCCTCATGGC
GGTGGGGGTGGTGGTGTACCGCCGCAACTGCCGTGACTTCGACACAGACATCACTGACTCATCTGCTGCCCTGACTGGTG
GTTTCCACCCCGTCAACTTTAAGACGGCAAGGCCCAGTAACCCGCAGCTCCTACACCCCTCTGTGCCTCCTGACCTGACA
GCCAGCGCCGGCATCTACCGCGGACCCGTGTATGCCCTGCAGGACTCCACCGACAAAATCCCCATGACCAACTCTCCTCT
GCTGGACCCCTTACCCAGCCTTAAGGTCAAGGTCTACAGCTCCAGCACCACGGGCTCTGGGCCAGGCCTGGCAGATGGGG
CTGACCTGCTGGGGGTCTTGCCGCCTGGCACATACCCTAGCGATTTCGCCCGGGACACCCACTTCCTGCACCTGCGCAGC
GCCAGCCTCGGTTCCCAGCAGCTCTTGGGCCTGCCCCGAGACCCAGGGAGCAGCGTCAGCGGCACCTTTGGCTGCCTGGG
TGGGAGGCTCAGCATCCCCGGCACAGGGGTCAGCTTGCTGGTGCCCAATGGAGCCATTCCCCAGGGCAAGTTCTACGAGA
TGTATCTACTCATCAACAAGGCAGAAAGTACCCTGCCGCTTTCAGAAGGGACCCAGACAGTATTGAGCCCCTCGGTGACC
TGTGGACCCACAGGCCTCCTGCTGTGCCGCCCCGTCATCCTCACCATGCCCCACTGTGCCGAAGTCAGTGCCCGTGACTG
GATCTTTCAGCTCAAGACCCAGGCCCACCAGGGCCACTGGGAGGAGGTGGTGACCCTGGATGAGGAGACCCTGAACACAC
CCTGCTACTGCCAGCTGGAGCCCAGGGCCTGTCACATCCTGCTGGACCAGCTGGGCACCTACGTGTTCACGGGCCAGTCC
TATTCCCGCTCAGCAGTCAAGCGGCTCCAGCTGGCCGTCTTCGCCCCCGCCCTCTGCACCTCCCTGGAGTACAGCCTCCG
GGTCTACTGCCTGGAGGACACGCCTGTAGCACTGAAGGAGGTGCTGGAGCTGGAGCGGACTCTGGGCGGATACTTGGTGG
AGGAGCCGAAACCGCTAATGTTCAAGGACAGTTACCACAACCTGCGCCTCTCCCTCCATGACCTCCCCCATGCCCATTGG
AGGAGCAAGCTGCTGGCCAAATACCAGGAGATCCCCTTCTATCACATTTGGAGTGGCAGCCAGAAGGCCCTCCACTGCAC
TTTCACCCTGGAGAGGCACAGCTTGGCCTCCACAGAGCTCACCTGCAAGATCTGCGTGCGGCAAGTGGAAGGGGAGGGCC
AGATATTCCAGCTGCATACCACTCTGGCAGAGACACCTGCTGGCTCCCTGGACACTCTCTGCTCTGCCCCTGGCAGCACT
GTCACCACCCAGCTGGGACCTTATGCCTTCAAGATCCCACTGTCCATCCGCCAGAAGATATGCAACAGCCTAGATGCCCC
CAACTCACGGGGCAATGACTGGCGGATGTTAGCACAGAAGCTCTCTATGGACCGGTACCTGAATTACTTTGCCACCAAAG
CGAGCCCCACGGGTGTGATCCTGGACCTCTGGGAAGCTCTGCAGCAGGACGATGGGGACCTCAACAGCCTGGCGAGTGCC
TTGGAGGAGATGGGCAAGAGTGAGATGCTGGTGGCTGTGGCCACCGACGGGGACTGCTGA

[0053] In a search of public sequence databases, the NOV1b nucleic acid sequence, located on chromsome 10 has 1604 of 1895 bases (84%) identical to a gb:GENBANK-ID:RNU87306|acc:U87306.1 mRNA from Rattus norvegicus (Rattus norvegicus transmembrane receptor Unc5H2 mRNA, complete cds). (E=0.0) Public nucleotide databases include all GenBank databases and the GeneSeq patent database.

[0054] The disclosed NOV1b polypeptide (SEQ ID NO: 4) encoded by SEQ ID NO: 3 has 933 amino acid residues and is presented in Table 1D using the one-letter amino acid code. Signal P. Psort and/or Hydropathy results predict that NOV1b has a signal peptide at the first 26 amino acids and is likely to be localized at the plasma membrane with a certainty of 0.5140. In other embodiments, NOV1b is likely to be localized to the microbody (peroxisome) with a certainty of 0.1064, to the endoplasmic reticulum (membrane) with a certainty of 0.1000, or to the endoplasmic reticulum (lumen) with a certainty of 0.1000. The most likely cleavage site for NOV1b is between positions 26 and 27: SQA-GT

TABLE 1D
Encoded NOV1b protein sequence.

(SEQ ID NO:4)

MGARSGARGALLLALLLCWDPRLSQAGTDSGSEVLPDSFPSAPAEPLPYFLQEPQDAYIVKNKPVELRCRAFPATQIYFK
CNGEWVSQNDHVTQEGLDEATGLRVREVQIEVSRQQVEELFGLEDYWCQCVAWSSAGTTKSRRAYVRIAYLRKNFDQEPL
GKEVPLDHEVLLQCRPPEGVPVAEVEWLKNEDVIDPTQDTNFLLTIDHNLIIRQARLSDTANYTCVAKNIVAKRRSTTAT
VIVYVNGGWSSWAEWSPCSNRCGRGWQKRTRTCTNPAPLNGGAFCEGQAFQKTACTTICPVDGAWTEWSKWSACSTECAH
WRSRECMAPPPQNGGRDCSGTLLDSKNCTDGLCMQLEASGDAALYAGLVVAIFVVVAILMAVGVVVYRRNCRDFDTDITD
SSAALTGGFHPVNFKTARPSNPQLLHPSVPPDLTASAGIYRGPVYALQDSTDKIPMTNSPLLDPLPSLKVKVYSSSTTGS
GPGLADGADLLGVLPPGTYPSDFARDTHFLHLRSASLGSQQLLGLPRDPGSSVSGTFGCLGGRLSIPGTGVSLLVPNGAI
PQGKFYEMYLLINKAESTLPLSEGTQTVLSPSVTCGPTGLLLCRPVILTMPHCAEVSARDWIFQLKTQAHQGHWEEVVTL
DEETLNTPCYCQLEPRACHILLDQLGTYVFTGESYSRSAVKRLQLAVFAPALCTSLEYSLRVYCLEDTPVALKEVLELER
TLGGYLVEEPKPLMFKDSYHNLRLSLHDLPHAHWRSKLLAKYQEIPFYHIWSGSQKALHCTFTLERHSLASTELTCKICV
RQVEGEGQIFQLHTTLAETPAGSLDTLCSAPGSTVTTQLGPYAFKIPLSIRQKICNSLDAPNSRGNDWRMLAQKLSMDRY
LNYFATKASPTGVILDLWEALQQDDGDLNSLASALEEMGKSEMLVAVATDGDC

[0055] A search of sequence databases reveals that the NOV1b amino acid sequence has 862 of 945 amino acid residues (91%) identical to, and 893 of 945 amino acid residues (94%) similar to, the 945 amino acid residue ptnr:SPTREMBL-ACC:008722 protein from Rattus norvegicus (Rat) (Transmembrane Receptor UNC5H2) (E=0.0). Public amino acid databases include the GenBank databases, SwissProt, PDB and PIR.

[0056] NOV1b is expressed in at least adrenal gland, bone marrow, brain—amygdala, brain—cerebellum, brain—hippocampus, brain—substantia nigra, brain—thalamus, brain—whole, fetal brain, fetal kidney, fetal liver, fetal lung, heart, kidney, lymphoma—Raji, mammary gland, pancreas, pituitary gland, placenta, prostate, salivary gland, skeletal muscle, small intestine, spinal cord, spleen, stomach, testis, thyroid, trachea, uterus. This information was derived by determining the tissue sources of the sequences that were included in the invention including but not limited to SeqCalling sources, Public EST sources, and/or RACE sources.

[0057] The disclosed NOV1a polypeptide has homology to the amino acid sequences shown in the BLASTP data listed in Table 1E.

TABLE 1E
BLAST results for NOV1a

| Gene Index/ | | Length | Identity | Positives | |
|---|---|---|---|---|---|
| Identifier | Protein/Organism | (aa) | (%) | (%) | Expect |
| ptnr: SPTREMBL- | 6330415E02RIK | 945 | 862/945 | 897/945 | 0.0 |
| ACC: Q9D398 | PROTEIN - Mus | | (91%) | (94%) | |
| | musculus (Mouse) | | | | |
| ptnr: SPTREMBL- | TRANSMEMBRANE | 945 | 862/945 | 893/945 | 0.0 |
| ACC: O08722 | RECEPTOR UNC5H2 | | (91%) | (94%) | |
| ptnr: SPTREMBL- | UNC-5 HOMOLOG (C. | 931 | 610/929 | 723/929 | 0.0 |
| ACC: O08747 | ELEGANS) | | (65%) | (77%) | |
| ptnr: SPTREMBL- | TRANSMEMBRANE | 931 | 598/929 | 718/929 | 0.0 |
| ACC: O95185 | RECEPTOR UNC5C - | | (64%) | (77%) | |
| | Homo sapiens | | | | |

[0058] The homology between these and other sequences is shown graphically in the ClustalW analysis shown in Table 1F. In the ClustalW alignment of the NOV1 proteins, as well as all other ClustalW analyses herein, the black outlined amino acid residues indicate regions of conserved sequence (i.e., regions that may be required to preserve structural or functional properties), whereas non-highlighted amino acid residues are less conserved and can potentially be altered to a much broader extent without altering protein structure or function.

[image]

[image]

[0059] The presence of identifiable domains in NOV1, as well as all other NOVX proteins, was determined by searches using software algorithms such as PROSITE, DOMAIN, Blocks, Pfam, ProDomain, and Prints, and then determining the Interpro number by crossing the domain match (or numbers) using the Interpro website (http:www.ebi.ac.uk/interpro). DOMAIN results for NOV1as disclosed in Tables 1G-1O, were collected from the Conserved Domain Database (CDD) with Reverse Position Specific BLAST analyses. This BLAST analysis software samples domains found in the Smart and Pfam collections. For Tables 1G-1O and all successive DOMAIN sequence alignments, fully conserved single residues are indicated by black shading or by the sign (|) and “strong” semi-conserved residues are indicated by grey shading or by the sign (+). The “strong” group of conserved amino acid residues may be any one of the following groups of amino acids: STA, NEQK, NHQK, NDEQ, QHRK, MILV, MILF, HY, FYW.

[0060] Tables 1G-1O list the domain descriptions from DOMAIN analysis results against NOV1a. This indicates that the NOV1a sequence has properties similar to those of other proteins known to contain this domain.

TABLE 1G
Domain Analysis of NOV1a

gnl|Smart|smarto00218, ZU5, Domain present in ZO-1 and Unc5-like netrin
receptors; Domain of unknown function. (SEQ ID NO:85)
CD-Length = 104 residues, 100.0% aligned
Score = 149 bits (376), Expect = 7e−37

| | | | |
|---|---|---|---|
| Query: | 529 | PGSSVSGTFGCLGGRLSIPGTGVSLLVPNGAIPQGKFYEMYLLINKAESTLPLSEGTQTV | 588 |
| | | \| \|\|\|\|\| \|\|\|\| \| \|\|\| \|++\| \|\|\|\|\|\| \| \|\|+++ \|\| \| \| +\|+ | |
| Sbjct: | 1 | PSFLVSGTFDARGGRLRGPRTGVRLIIPPGAIPQGTRYTCYLVVHDKLSTPPPLEEGETL | 60 |
| Query: | 589 | LSPSVTCGPTGLLLCRPVILTMPHCAEVSARDWIFQLKTQAHQG 632 | |
| | | \|\|\| \| \|\|\| \| \| \|\|\|\|\| +\|\|\|\| + \|\|\| \| + \| | |
| Sbjct: | 61 | LSPVVECGPHGALFLRPVILEVPHCASLRPRDWEIVLLRSENGG 104 | |

[0061] TABLE 1H
Domain Analysis of NOV1a

gnl|Pfam|pfam00791, ZU5, ZU5 domain. Domain present in ZO-1 and Unc5-like
netrin receptors Domain of unknown function. (SEQ ID NO:86)
CD-Length = 104 residues, 100.0% aligned
Score = 147 bits (371), Expect = 3e−36

| | | | |
|---|---|---|---|
| Query: | 529 | PGSSVSGTFGCLGGRLSIPGTGVSLLVPNGAIPQGKFYEMYLLINKAESTLPLSEGTQTV | 588 |
| | | \| \|\|\|\|\| \|\|\|\| \| \|\|\| \|++\| \|\|\|\|\|\| \| \|\|+++ \|\| \| \| +\|+ | |
| Sbjct: | 1 | SGFLVSGTFDARGGRLRGPRTGVRLIIPPGAIPQGTRYTCYLVVHDKLSTPPPLEEGETL | 60 |
| Query: | 589 | LSPSVTCGPTGLLLCRPVILTMPHCAEVSARDWIFQLKTQAHQG 632 | |
| | | \|\|\| \| \|\|\| \| \| \|\|\|\|\| +\|\|\|\| + \|\|\| \| + \| | |
| Sbjct: | 61 | LSPVVECGPHGALFLRPVILEVPHCASLRPRDWELVLLRSENGG 104 | |

[0062] TABLE 1I
Domain Analysis of NOV1a

gnl|Smart|smart00005, DEATH, DEATH domain, found in proteins involved
in cell death (apoptosis).; Alpha-helical domain present in a variety
of proteins with apoptotic functions. Some (but not all) of these
domains form homotypic and heterotypic dimers. (SEQ ID NO:87)
CD-Length = 96 residues, 99.0% aligned
Score = 64.7 bits (156), Expect = 2e−11

| | | | |
|---|---|---|---|
| Query: | 840 | GPYAFKIPLSIRQKICNSLDAPNSRGNDWRMLAQKLSM-DRYLNYFATKAS-----PTGV | 893 |
| | | \| \| + \|+\|+ \|\| + \|+\|\|\| \|\|+\|\| + + ++ \|++ + | |
| Sbjct: | 1 | PPGAASLTELTREKLAKLLD--HDLGDDWRELARKLGLSEADIDQIETESPRDLAEQSYQ | 58 |
| Query: | 894 | ILDLWEALQQDDGDLNSLASALEEMGKSEMLVAVATD 930 | |
| | | +\| \|\|\| + + \| +\| \|\| +\|\|+ + + + ++ | |
| Sbjct: | 59 | LLRLWEQREGKNATLGTLLEALRKMGRDDAVELLRSE 95 | |

[0063] TABLE 1J
Domain Analysis of NOV1a

gnl|Smart|smart00209, TSP1, Thrombospondin type 1 repeats; Type 1
repeats in thrombospondin-1 bind and activate TGF-beta.
(SEQ ID NO:88)
CD-Length = 51 residues, 100.0% aligned
Score = 62.4 bits (150), Expect = 1e−10

| | | | |
|---|---|---|---|
| Query: | 249 | WSSWAEWSPCSNRCGRGWQKRTRTCTNPAPLNGGAFCEGQAFQKTACTT-ICP | 300 |
| | | \| \|+\|\|\|\|\|\| \|\| \| \| \|\|\| \| \| \|\|\| \| \| + \|\| \|\| | |
| Sbjct: | 1 | WGEWSEWSPCSVTCGGGVQTRTRCCNPPP--NGGGPCTGPDTETRACNEQPCP | 51 |

[0064] TABLE 1K
Domain Analysis of NOV1a

gnl|Smart|smart00209, TSP1, Thrombospondin type 1 repeats; Type 1
repeats in thrombospondin-1 bind and activate TGF-beta.
(SEQ ID NO:88)
CD-Length = 51 residues, 98.0% aligned
Score = 49.3 bits (116), Expect = 1e−06

| | | | |
|---|---|---|---|
| Query: | 305 | WTEWSKWSACSTECAH-WRSRECMAPPPQNGGRDCSGTLLDSKNCTDGLC | 353 |
| | | \| \|\|\|+\|\| \|\| \| ++\| \|\| \|\|\| \|+\| +++ \| + \| | |
| Sbjct: | 1 | WGEWSEWSPCSVTCGGGVQTRTRCCNPPPNGGGPCTGPDTETRACNEQPC | 50 |

[0065] TABLE 1L
Domain Analysis of NOV1a

gnl|Pfam|pfam00531, death, Death domain. (SEQ ID NO:89)
CD-Length = 83 residues, 98.8% aligned
Score = 57.4 bits (137), Expect = 4e−09

| | | | |
|---|---|---|---|
| Query: | 852 | QKICNSLDAPNSRGNDWRMLAQKLSM-DRYLNYFATKA----SPTGVILDLWEALQQDDG | 906 |
| | | +++\| \|\| \| \| \|\|\| \|\|+\|\| + + ++ + \|\|\| +\|\|\|\|\| + | |
| Sbjct: | 1 | RELCKLLDDP--LGRDWRRLARKLGLSEEEIDQIEHENPRLASPTYQLLDLWEQRGGKNA | 58 |
| Query: | 907 | DLNSLASALEEMGKSEMLVAVATD 930 | |
| | | + +\| \|\| +\|\|+ + + + + | |
| Sbjct: | 59 | TVGTLLEALRKMGRDDAVELLESA 82 | |

[0066] TABLE 1M
Domain Analysis of NOV1a

gn1|Pfam|pfam00090, tsp_1, Thrombospondin type 1 domain.
(SEQ ID NO:90)
CD-Length = 48 residues, 91.7% aligned
Score = 49.7 bits (117), Expect = 7e−07

| | | | |
|---|---|---|---|
| Query: | 250 | SSWAEWSPCSNRCGRGWQKRTRTCTNPAPLNGGAFCEGQAFQKTACT | 296 |
| | | \| \|+\|\|\|\|\|\| \|\|+\| \| \| \|\|\| +\|\| \|\| \| \| \| + \|\| | |
| Sbjct: | 1 | SPWSEWSPCSVTCGKGIRTRQRTCNSPA---GGKPCTGDAQETEACM | 44 |

[0067] TABLE 1N
Domain Analysis of NOV1a

gn1|Smart|smart00409, IG, Immunoglobulin (SEQ ID NO:91)
CD-Length = 86 residues, 100.0% aligned
Score = 48.9 bits (115), Expect = 1e−06

| | | | |
|---|---|---|---|
| Query: | 159 | PLGKEVPLDHEVLLQCRPPEGVPVAEVEWLKNEDVIDPTQDTNFLLTIDHN---LIIRQA | 215 |
| | | \| \| \| \| \| \| \| \| \| \| + + \| ++ \| \| | |
| Sbjct: | 1 | PPSVTVKEGESVTLSCEAS-GNPPPTVTWYKQGGKL-LAESGRFSVSRSGGNSTLTISNV | 58 |
| Query: | 216 | RLSDTANYTCVAKNIVAKRRSTTATVIVY 244 | |
| | | \|+ \|\|\| \| \| \| \| \|+ \| | |
| Sbjct: | 59 | TPEDSGTYTCAATNSSGSASSGT-TLTVL 86 | |

[0068] TABLE 10
Domain Analysis of NOV1a

gn1|Smart|smart00408, IGc2, Immunoglobulin C-2 Type (SEQ ID NO:92)
CD-Length = 63 residues. 87.3% aligned
Score = 42.7 bits (99), Expect = 9e−05

| | | | |
|---|---|---|---|
| Query: | 170 | VLLQCRPPEGVPVAEVEWLKNEDVIDPTQDTNFLLTIDHNLIIRQARLSDTANYTCVAKN | 229 |
| | | \| \| \| \| \| \|\| + \|\|\|+ + ++ ++ \| \|+ \| \|+ \|\|\|\|\|+\| | |
| Sbjct: | 6 | VTLTC-PASGDPVPNITWLKDGKPLPESR----VVASGSTLTIKNVSLEDSGLYTCVARN | 60 |

[0069] Migration of neurons from proliferative zones to their functional sites is fundamental to the normal development of the central nervous system. Disruption of the mouse rostral cerebellar malformation mutation (rcm) gene, also called the Unc5h3 gene, resulted in a failure of tangentially migrating granule cells to recognize the rostral boundary of the cerebellum. In rcm-mutant mice, the cerebellum is smaller and has fewer folia than in wildtype, ectopic cerebellar cells are present in midbrain regions by 3 days after birth, and there are abnormalities in postnatal cerebellar-neuronal migration. Ackerman et al. (1997). Sequence analysis has revealed that the predicted rcm mouse protein is a transmembrane protein that contains 2 immunoglobulin (Ig)-like domains and 2 type I thrombospondin (THBS1) motifs in the extracellular region. Ig and THBS1 domains are also found in the extracellular region of the C. elegans UNC5 transmembrane protein, and the C-terminal 865-amino acid region of Rcm is 30% identical to UNC5. In addition, the UNC5 protein is essential for dorsal guidance of pioneer axons and for the movement of cells away from the netrin ligand. Ackerman et al. (1997). In the developing brain of vertebrates, netrin-1 plays a role in both cell migration and axonal guidance.

[0070] In the developing nervous system, migrating cells and axons are guided to their targets by cues in the extracellular environment. The netrins are a family of phylogenetically conserved guidance cues that can function as diffusible attractants and repellents for different classes of cells and axons. In vertebrates, insects and nematodes, members of the DCC subfamily of the immunoglobulin superfamily have been implicated as receptors that are involved in migration towards netrin sources. In Caenorhabditis elegans, the transmembrane protein UNC-5 has been implicated in these responses, as loss of UNC-5 function causes migration defects and ectopic expression of UNC-5 in some neurons can redirect their axons away from a netrin source.

[0071] The disclosed NOV1 nucleic acid of the invention encoding a UNC5H2-like protein includes the nucleic acid whose sequence is provided in Table 1A, 1C or a fragment thereof. The invention also includes a mutant or variant nucleic acid any of whose bases may be changed from the corresponding base shown in Table 1A or 1C while still encoding a protein that maintains its UNC5H2 like activities and physiological functions, or a fragment of such a nucleic acid. The invention further includes nucleic acids whose sequences are complementary to those just described, including nucleic acid fragments that are complementary to any of the nucleic acids just described. The invention additionally includes nucleic acids or nucleic acid fragments, or complements thereto, whose structures include chemical modifications. Such modifications include, by way of nonlimiting example, modified bases, and nucleic acids whose sugar phosphate backbones are modified or derivatized. These modifications are carried out at least in part to enhance the chemical stability of the modified nucleic acid, such that they may be used, for example, as antisense binding nucleic acids in therapeutic applications in a subject. In the mutant or variant nucleic acids, and their complements, up to about 16 percent of the bases may be so changed.

[0072] The disclosed NOV1 protein of the invention includes the UNC5H2-like protein whose sequence is provided in Table 1B or 1D. The invention also includes a mutant or variant protein any of whose residues may be changed from the corresponding residue shown in Table 1B or 1D while still encoding a protein that maintains its UNC5H2-like activities and physiological functions, or a functional fragment thereof. In the mutant or variant protein, up to about 9 percent of the residues may be so changed.

[0073] The invention further encompasses antibodies and antibody fragments, such as F_{ab} or (F_{ab})₂, that bind immunospecifically to any of the proteins of the invention.

[0074] The above defined information for this invention suggests that this UNC5H2-like protein (NOV1) may function as a member of a “UNC5H2 family”. Therefore, the NOV1 nucleic acids and proteins identified here may be useful in potential therapeutic applications implicated in (but not limited to) various pathologies and disorders as indicated below. The potential therapeutic applications for this invention include, but are not limited to: protein therapeutic, small molecule drug target, antibody target (therapeutic, diagnostic, drug targeting/cytotoxic antibody), diagnostic and/or prognostic marker, gene therapy (gene delivery/gene ablation), research tools, tissue regeneration in vivo and in vitro of all tissues and cell types composing (but not limited to) those defined here.

[0075] The NOV 1 nucleic acids and proteins of the invention are useful in potential therapeutic applications implicated in cancer including but not limited to various pathologies and disorders as indicated below. For example, a cDNA encoding the UNC5H2-like protein (NOV1) may be useful in gene therapy, and the UNC5H2 -like protein (NOV1) may be useful when administered to a subject in need thereof. By way of nonlimiting example, the compositions of the present invention will have efficacy for treatment of patients suffering from cardiomyopathy, atherosclerosis, hypertension, congenital heart defects, aortic stenosis, atrial septal defect (ASD), atrioventricular (A-V) canal defect, ductus arteriosus, pulmonary stenosis, subaortic stenosis, ventricular septal defect (VSD), valve diseases, tuberous sclerosis, scleroderma, obesity, transplantation, diabetes, autoimmune disease, renal artery stenosis, interstitial nephritis, glomerulonephritis, polycystic kidney disease, systemic lupus erythematosus, renal tubular acidosis, IgA nephropathy, hypercalceimia, Lesch-Nyhan syndrome, Von Hippel-Lindau (VHL) syndrome, Alzheimer's disease, stroke, tuberous sclerosis, Parkinson's disease, Huntington's disease, cerebral palsy, epilepsy, Lesch-Nyhan syndrome, multiple sclerosis, ataxia-telangiectasia, leukodystrophies, behavioral disorders, addiction, anxiety, pain, neuroprotection, cancers, and/or other pathologies and disorders. For example, a cDNA encoding the transmembrane receptor UNC5H2-like protein may be useful in transmembrane receptor UNC5H2 therapy, and the transmembrane receptor UNC5H2-like protein may be useful when administered to a subject in need thereof. By way of nonlimiting example, the compositions of the present invention will have efficacy for treatment of patients suffering from cardiomyopathy, atherosclerosis, hypertension, congenital heart defects, aortic stenosis, atrial septal defect (ASD), atrioventricular (A-V) canal defect, ductus arteriosus, pulmonary stenosis, subaortic stenosis, ventricular septal defect (VSD), valve diseases, tuberous sclerosis, scleroderma, obesity, transplantation, diabetes, autoimmune disease, renal artery stenosis, interstitial nephritis, glomerulonephritis, polycystic kidney disease, systemic lupus erythematosus, renal tubular acidosis, IgA nephropathy, hypercalceimia, Lesch-Nyhan syndrome, Von Hippel-Lindau (VHL) syndrome, Alzheimer's disease, stroke, tuberous sclerosis, Parkinson's disease, Huntington's disease, cerebral palsy, epilepsy, Lesch-Nyhan syndrome, multiple sclerosis, ataxia-telangiectasia, leukodystrophies, behavioral disorders, addiction, anxiety, pain, neuroprotection, cancers, and other diseases, disorders and conditions of the like. Also since this gene is expressed at a measurably higher level in several cancer cell lines (including breast cancer, CNS cancer, colon cancer, gastric cancer, lung cancer, melanoma, ovarian cancer and pancreatic cancer), it may be useful in diagnosis and treatment of these cancers. The NOV1 nucleic acid encoding the UNC5H2-like protein of the invention, or fragments thereof, may further be useful in diagnostic applications, wherein the presence or amount of the nucleic acid or the protein are to be assessed.

[0076] NOV1 nucleic acids and polypeptides are further useful in the generation of antibodies that bind immuno-specifically to the novel NOV1 substances for use in therapeutic or diagnostic methods. These antibodies may be generated according to methods known in the art, using prediction from hydrophobicity charts, as described in the “Anti-NOVX Antibodies” section below. The disclosed NOV1 proteins have multiple hydrophilic regions, each of which can be used as an immunogen. In one embodiment, a contemplated NOV1 epitope is from about amino acids 1 to 100. In another embodiment, a NOV1 epitope is from about amino acids 200 to 300. In further embodiments, a NOV1 epitope is from about amino acids 450 to 500, from about amino acids 600 to 900, from about amino acids 950 to 1000, from about amino acids 1200 to 1300, from about amino acids 1400 to 1600, from about amino acids 1800 to 1900, from about amino acids 1950 to 2050, and from about amino acids 2200 to 2300. These novel proteins can be used in assay systems for functional analysis of various human disorders, which will help in understanding of pathology of the disease and development of new drug targets for various disorders.

[0077] NOV2

[0078] NOV2 includes three novel protein tyrosine phosphatase precursor-like proteins disclosed below. The disclosed sequences have been named NOV2a, NOV2b, and NOV2c.

[0079] NOV2a

[0080] A disclosed NOV2a nucleic acid of 6994 nucleotides (also referred to as SC126422078_A) encoding a receptor protein tyrosine phosphatase precursor-like protein is shown in Table 2A. An open reading frame was identified beginning with an ATG initiation codon at nucleotides 31-33 and ending with a TAA codon at nucleotides 6874-6876. A putative untranslated region upstream from the initiation codon and downstream from the termination codon is underlined in Table 2A. The start and stop codons are in bold letters.

TABLE 2A
NOV2a nucleotide sequence.

(SEQ ID NO:5)

TGATTCTACTGGCTGAAAAATGTAATAAAGATGGATTTTCTTATCATTTTTCTTTTACTTTTTATTGGGACT
TCAGAGACACAGGTAGATGTTTCCAATGTCGTTCCTGGTACTAGGTACGATATAACCATCTCTTCAATTTCT
ACAACATACACCTCACCTGTTACTAGAATAGGGGCTTCTAATGAACCAGGGCCTCCAGTCTTCCTAGCCGGG
GAAAGAGTCGGATCTGCTGGGATTCTTCTGTCTTGGAATACACCACCTAATCCAAATGGAAGGATTATATCT
TACATTGTCAAATATAAGGAAGTTTGTCCGTGGATGCAAACAGTATATACACAAGTCAGATCAAAGCCAGAC
AGTCTGGAAGTTCTTCTTACTAATCTTAATCCTGGAACAACATATGAAATTAAGGTAGCTGCTGAAAACAGT
GCTGGCATTGGAGTGTTTAGTGATCCATTTCTCTTCCAAACTGCAGAAAGTGCTCCAGGAAAAGTGGTGGAT
TTCACAGGTGAGGCTGTCCCGTTCAGCAGTAAGCTGATGTGGTATACCTCGGCAACCAAAAAAAAAATTACC
AGCTTCAAGATTAGTGTCAAGCATAACAGAAGTGGGATAGTAGTGAAAGAACTGTCAATCAGAGTGGAGTGC
ATTTTAAGTGCTTCCCTTCCTTTCCACTGCAACGAGAATAGTGAATCTTTTTTATCGAGTACAGCCAGCCCT
TCTCCAACCCTTGGTAGAGTTACACCTCCATCGCGTACCACACATTCATCAAGCACGTTGACACAGAATGAG
ATCAGCTCTGTGAAAGAGCCTATCAGTTTTGTAGTGACACACTTGAGACCTTATACAACATATCTTTTTGAA
GTTTCAGCTGCTACAACTGAAGCAGGTTATATTGATAGTACCATTGTCAGAACACCAGAATCAGTGCCTGAA
GGACCACCACAAAACTGCGTAACAGGCAACATCACAGGAAAGTCCTTTTCAATTTTATGGGACCCACCAACT
ATAGTAACAGGGAAATTTAGTTATAGAGTTGAATTATATGGACCATCAGCACGTCGCATTTTGGATAACAGC
ACAAAAGACCTCAAGTTTGCATTCACTAACCTAACACCATTTACAATGTATGATGTCTATATTGCGGCTGAA
ACCAGTGCAGGGACTGGGCCCAAGTCAAATATTTCAGTATTCACTCCACCAGATGTTCCAGGGGCAGTGTTT
GATTTACAACTTGCAGACGTAGAATCCACGCAAGTAAGAATTACTTGGAAGAAACCACGACAACCAAATGGA
ATTATThACCAATACCGAGTGAAAGTGCTAGTTCCAGAGACAGGAATAATTTTGGAAAATACTTTGCTCACT
GGAAATAATGAGATAAATGACCCCATGGCTCCAGAAATTGTGAACATAGTACAGCCAATCGTAGGATTATAT
GAGGGTTCAGCAGAGATGTCGTCTGACCPTCACTCACTTGCTACATTTATATATAACAGCCATCCAGATAAA
AACTTTCCTGCAACGAATAGAGCTGAAGACCAGACTTCACCAGTTGTAACTACAAGGAATCAGTATATTACT
GACATTGCAGCTGAACAGCTGACTTATCTTCTTATCAGATTAAGGAGATTTTGGGCTGAGACAATGGGGTTT
TCTAGATATACAATCATGTCATCTGCAAGCAGGGACAATTTGACTTCCCCAGGCCCTTTGTCAGCCCAAAAT
TTCAGAGTTACACATGTTACCATAACAGAAGTATTTTTACACTGGGATCCTCCAGATCCTGTATTTTTTCAT
CATTACCTTATCACTATTTTGGATGTTGAAAACCAATCCAAGAGTATTATTTTAAGGACATTAAACAGTTTG
TCTCTTGTCCTTATAGGGTTAAAGAAATACACAAAATACAAAATGAGAGTGGCAGCCTCAACCCACGTTGGA
GAAAGTTCTTTGTCTGAAGAAAATGACATCTTTGTGAGAACTTCAGAAGATGAACCGGAATCATCACCTCAA
GATGTCGAAGTAATTGATGTTACCGCAGATGAAATAAGGTTGAAGTGGTCACCACCCGAAAAGCCCAATGGC
ATCATTATTGCTTATGAAGTGCTATATAAAAATATAGATACTTTATATATGAAGAACACATCAACAACAGAC
ATAATATTAAGGAACTTAAGACCTCACACCCTCTATAACATTTCTGTAAGGTCTTACACCAGATTTGGTCAT
GGCAATCAGGTATCTTCTTTACTCTCTGTAAGGACTTCGGAGTCAGTGCCTCATAGTGCACCAGAAAATATC
ACTTACAAAAATATTTCTTCTGGACAGATTGAGCTATCATTCCTTCCCCCAAGTAGTCCCAATGGAATCATA
CAAAAATATACAATTTATCTCAAGAGAAGTAATGGAAATGAGGAAAGAACTATAAATACAACCTCTTTAACC
CAAAACATTAAAGGTCTCAAGAAATATACCCAATATATCATTGAGGTGTCTGCTAGTACACTCAAAGGTGAA
GGAGTTCGGAGTGCTCCCATAAGTATACTGACGGAGGAAGATGCTCCTGATTCTCCCCCTCAAGACTTCTCT
GTAAAACAGTTGTCTGGTGTCACGGTGAAGTTGTCATGGCAACCACCCCTGGAGCCAAATGGAATTATCCTT
TATTACACAGTTTATGTCTGGAGATCATCATTAAAAACTATTAATGTCACTGAAACATCATTGGAGTTATCA
GATTTGGATTATAATGTTGAATACAGTGCTTATGTAACAGCTAGCACCAGATTTGGTGATGGGAAAACAAGA
AGCAATATCATTAGCTTTCAAACACCAGAGGGACCAAGCGATCCTCCCAAAGATGTTTATTATGCAAACCTC
AGTTCTTCATCAATAATTCTTTTCTGGACACCTCCTTCAAAACCTAATGGGATTATACAATATTACTCTGTT
TATTACAGAAATACTTCAGGTACTTTTATGCAGAATTTTACACTCCATGAAGTAACCAATGAcTTTGACAAT
ATGACTGTATCCACAATTATAGATAAACTGACAATATTCAGCTACTATACATTTTGGTTAACACCAAGTACT
TCAGTTGGAAATGGGAATAAAAGCAGTGACATCATTGAAGTATACACAGATCAAGACGTACCTGAAGGGTTT
GTTGGAAACCTGACTTACGAATCCATTTCGTCAACTGCAATAAATGTAACCTGGGTCCCACCGGCTCAACCA
AACGGTCTAGTCTTCTACTATGTTTCACTGATCTTACAGCAGACTCCTCGCCATGTGAGACCACCTCTTGTT
ACATATGAGAGAAGCATATATTTTGATAATCTGGAAAAATACACTGATTATATATTAAAAATTACTCCATCA
ACAGAAAACCGATTCTCTGATACCTATACTGCCCAGCTATACATCAAGACTGAAGAAGATATCCCAGAAACT
TCACCAATAATCAACACTTTTAAAAACCTTTCCTCTACCTCAGTTCTCTTATCATGGGATCCCCCAGTAAAG
CCAAATGGTGCAATAATAAGTTATGATTTAACTTTACAAGGACCAAATGAAAATTATTCTTTCATTACTTCT
GATAATTACATAATATTGGAAGAGCTTTCACCATTTACATTATATAGCTTTTTTGCTGCCGCAAGAACTAGA
AAAGGACTTGGTCCTTCCAGTATTCTTTTCTTTTACACAGATGAGTCAGTGCCGTTAGCACCTCCACAAAAT
TTGACTTTAATCAACTGTACTTCAGACTTTGTNTGGCTGAAATGGAGCCCAAGTCCTCTTCCAGGTGGTATT
GTTAAAGTATATAGTTTTAAAATTCATGAACATGAAACTGACACTATATATTATAAOAATATATCAGCATTT
AAAACTGAAGCCAAACTTGTTGGACTGGAACCAGTCAGCACCTACTCTATCCGTGTATCTGCGTTCACCAAA
GTTGCAAATGGCAATCAATTTAGTAATGTAGTAAAATTCACAACCCAAGAATCAGTTCCAGATGTCGTGCAG
AATATGCAGTGCATGGCAACTAGCTGGCAGTCAGTTTTAGTGAAATGGGATCCACCCAAAAAGGCAAATGGA
ATAATAACGCAGTATATGGTAACAGTTGAAACGAATTCTACAAAAGTTTCTCCCCAAGATCACATGTACACT
TTCATAAAGCTTCTTGCCAATACCTCATATGTCTTTAAAGTAAGAGCTTCAACCTCAGCTGGTGAAGGTGAT
GAAAGCACATGCCATGTCAGCACACTACCTGAAACAGTTCCCAGTGTTCCCACAAATATTGCTTTTTCTGAT
GTTCAGTCAACTAGTGCAACATTGACATGGATAAGACCTGACACTATCCTTGGCTACTTTCAAAATTACAAA
ATTACCACTCAACTTCGTGCTCAAAAATGCAAAGAATGGGAATCCGAAGAATGTGTTGAATATCAAAAAATT
CAATACCTCTATGAAGCTCACTTAACTGAAGAGACAGTATATGGATTAAAGAAATTTAGATCGTATAGATTC
CAAGTGGCTGCCAGCACCAATGCTGGCTATGGCAATGCTTCAAACTGGATTTCTACAAAAACTCTGCCTGGC
CCTCCAGATGGTCCTCCTGAAAATGTTCATGTAGTAGCAACATCACCTTTTAGCATCAGCATAAGCTGGAGT
GAACCTGCTGTCATTACTGGACCAACATGTTATCTGATTGATGTCAAATCGGTAGATAATGATGAATTTAAT
ATATCCTTCATCAAGTCAAATGAAGAAAATAAAACCATAGAAATTAAAGATTTAGAAATATTCACAAGGTAT
TCTGTAGTGATCACTGCATTTACTGGGAACATTAGTGCTGCATATGTAGAAGGGAAGTCAAGTGCTGAAATG
ATTGTTACTACTTTAGAATCAGCCCCAAACCACCCACCTAACAACATCACATTTCAGAACATACCAGATGAA
GTTACAAAATTTCAATTAACGTTCCTTCCTCCTTCTCAACCTAATGGAAATATCCAAGTATATCAAGCTCTG
GTTTACCGAGAAGATGATCCTACTGCTGTCCAGATTCACAACCTCAGTATTATACAGAAAACCAACACATTC
GTCATTGCAATGCTACAAGGACTAAAAGGTGGACATACATACAATATCAGTGTTTACGCAGTCAATAGTGCT
GGTGCAGGTCCAAAGGTTCCGATGAGAATAACCATGGATATCAAAGCTCCAGCACGACCAAAAACCAAACCA
ACCCCTATTTATGATGCCACAGGAAAACTGCTTGTGACTTCAACAACAATTACAATCAGAATGCCAATATGT
TACTACAGTGATGATCATGCACCAATAAAAAATGTACAAGTGCTTGTGACAGAAACAGCAGCTCAGCATGAT
GGAAATGTAACAAAGTGGTATGATGCATATTTTAATAAAGCAAGGCCATATTTTACAAATGAAGGCTTTCCT
AACCCTCCATGTACAGAAGGAAAGACAAAGTTTAGTGGCAATGAAGAAATCTACATCATAGGTGCTGATAAT
GCATGCATGATTCCTGGCAATGAAGACAAAATTTGCAATGGACCACTGAAACCAAAAAAGCAATACTTATTT
AAATTTAGAGCTACAAATATTATGGGACAATTTACTGACTCTGATTATTCTGACCCTGTTAAGACTTTAGGC
GAAGGACTTTCAGAAAGAACCGTAGAGATCATTCTTTCCGTCACTTTGTGTATCCTTTCAATAATTCTCCTT
GGAACAGCTATTTTTGCATTTGCAAGAATTCGACAGAAGCAGAAAGAAGGTGGCACATACTCTCCTCAGGAT
GCAGAAATTATTGACACTAAATTGAAGCTGGATCAGCTCATCACAGTGGCAGACCTGGAACTGAAGGACGAG
AGATTAACGCGGCCAATAAGCAAGAAATCCTTCCTGCAACATGTTGAACAGCTTTGCACAAACAACAACCTA
AAGTTTCAAGAAGAATTTTCGGAATTACCAAAATTTCTTCAGGATCTTTCTTCAACTGATCCTGATCTGCCT
TGGAATAGAGCAAAAAACCGCTTCCCAAACATAAAACCATATAATAATAACAGAGTAAAGCTGATAGCTGAC
GCTAGTGTTCCAGGTTCGGATTATATTAATGCCAGCTATATTTCTGGTTATTTATGTCCAAATGAATTTATT
GCTACTCAAGGTCCACTACCAGGAACAGTTGGAGATTTTTGGAGAATGGTGTGGGAAACCAGAGCAAAAACA
TTAGTAATGCTAACACAGTGTTTTGAAAAAGGACGGATCAGATGCCATCAGTATTGGCCAGACCACAACAAG
CCAGTTACTGTCTTTGGAGATATAGTGATTACAAAGCTAATGGAGGATGTTCAAATAGATTGGACTATCAGG
GATCTGAAAATTGAAAGGCATGGGGATTGCATGACTGTTCGACAGTGTAACTTTACTGCCTGGCCAGAGCAT
GGGGTTCCTGAGAACAGCGCCCCTCTAATTCACTTTGTGAAGTTGGTTCGAGCAAGCACGCCACATGACACC
ACACCTATGATTGTTCACTGCAGTGCTGGAGTTGGAAGAACTGGAGTTTTTATTGCTCTGGACCATTTAACA
CAACATATAAATGACCATGATTTTGTGGATATATATGGACTAGTAGCTCAACTGAGAAGTGAAAGAATGTGC
ATGGTGCAGAATCTGGCACAGTATATCTTTTTACACCAGTGCATTCTGGATCTCTTATCAAATAAGGGAAGT
AATCAGCCCATCTGTTTTGTTAACTATTCAGCACTTCAGAAGATGGACTCTTTGGACGCCATGGAAGGTGGT
GATGTTGAGCTTGAATGGGAAGAAACCACTATGTAAATATTCAGACCAAAGGATACAATTGGAAGAGATTTT
TAAATCCCAGGGGCCAAAGTTACCCCCTCATTCTTCCGAATTGAAATGTGCAACCTTAAAGAAATATCTATC
CTTCTCTCAC

[0081] In a search of public sequence databases, the NOV2a nucleic acid sequence, located on chromsome 12 has 777 of 3293 bases (84%) identical to a gb:GENBANK-ID:AF063249|acc:AF063249.1 mRNA from Rattus norvegicus (Rattus norvegicus glomerular mesangial cell receptor protein-tyrosine phosphatase precursor (PTPRQ) mRNA, complete cds) (E=0.0). Public nucleotide databases include all GenBank databases and the GeneSeq patent database.

[0082] The disclosed NOV2a polypeptide (SEQ ID NO: 6) encoded by SEQ ID NO: 5 has 2281 amino acid residues and is presented in Table 2B using the one-letter amino acid code. Signal P, Psort and/or Hydropathy results predict that NOV2a has a signal peptide and is likely to be localized in the plasma membrane with a certainty of 0.4600. In other embodiments, NOV2a may also be localized to the microbody (peroxisome) with acertainty of 0.1381, the endoplasmic reticulum (membrane) with a certainty of 0.1000 or in the endoplasmic reticulum (lumen) with a certainty of 0.1000. The most likely cleavage site for a NOV2a peptide is between amino acids 17 and 18, at: SET-QV.

TABLE 2B
Encoded NOV2a protein sequence.

(SEQ ID NO:6)

MDFLIIFLLLFIGTSETQVDVSNVVPGTRYDITISSISTTYTSPVTRIGASNEPGPPVFLAGERVGSAGILL
SWNTPPNPNGRIISYIVKYKEVCPWMOTVYTQVRSKPDSLEVLLTNLNPGTTYEIKVAAENSAGIGVFSDPF
LFQTAESAPGKVVDFTGEAVPFSSKLMWYTSATKKKITSFKISVKHNRSGIVVKEVSIRVECILSASLPLHC
NENSESFLWSTASPSPTLGRVTPPSRTTHSSSTLTQNEISSVKEPISFVVTHLRPYTTYLFEVSAATTEAGY
IDSTIVRTPESVPEGPPQNCVTGNITGKSFSILWDPPTIVTGKFSYRVELYGPSAGRILDNSTKDLKFAFTN
LTPFTMYDVYIAAETSAGTGPKSNISVFTPPDVPGAVFDLQLAEVESTQVRITWKKPRQPNGIINQYRVKVL
VPETGIILEWTLLTGNNEINDPMAPETVNIVQPMVCLYEGSAEMSSDLHSLATFIYNSHPDKNFPARNPAED
QTSPVVTTRNQYITDIAAEQLTYVLIRLRRFWAETMGFSRYTIMSSASRDNLTSPGPLSAQNFRVTHVTITE
VFLHflPPDPVFFHHYLITILDVENQSKSIILRTLNSLSLVLIGLKKYTKYKMRVAASTHVGESSLSEENDI
FVRTSEDEPESSPQDVEVIDVTADEIRLKWSPPEKPNGIIIAYEVLYKJIDTLYMKNTSTTDIILRNLRPHT
LYNISVRSYTRFGHGNQVSSLLSVRTSESVPDSAPENITYKNISSGEIELSFLPPSSPNGTIQKYTIYLKRS
NGNEERTINTTSLTQNIKGLKKYTQYIIEVSASTLKGEGVRSAPISILTEEDAPDSPPQDFSVKQLSGVTVK
LSWQPPLEPNGIILYYTVYVWRSSLKTINVTETSLELSDLDYNVEYSAYVTASTRFGDGKTRSNIISFQTPE
GPSDPPKDVYYANLSSSSIILFWTPPSKPNGIIQYYSVYYRNTSGTFMQNFTLHEVTNDFDNMTVSTIIDKL
TIFSYYTFWITASTSVGNGNKSSDIIEVYTDQDVPEGFVGNLTYESISSTAINVSWVPPAQPNGLVFYYVSL
ILQQTPRHVRPPLVTYERSIYFDNLEKYTDYILKITPSTEKGFSDTYTAQLYIKTEEDIPETSPIINTFKNL
SSTSVLLSWDPPVKPNGAIISYDLTLQGPNENYSFITSDNYIILEELSPFTLYSFFAAARTRKGLGPSSILF
FYTDESVPLAPPQNLTLINCTSDFVWLKWSPSPLPGGIVKVYSFKIHEHETDTIYYKNISGFKTEAKLVGLE
PVSTYSIRVSAFTKVGNGNQFSNVVKFTTQESVPDVVQNMQCMATSWQSVLVKWDPPKKANGIITQYMVTVE
RNSTKVSPQDHMYTFIKLLANTSVVFKVRASTSAGEGDESTCHVSTLPETVPSVPTNIAFSDVQSTSATLTW
IRPDTILGYFQNYKITTQLRAQKCKEWESEECVEYQKIQYLYEAHLTEETVYGLKKFRWYRFQVAASTNAGY
GNASNWISTKTLPGPPDGPPENVHVVATSPFSISISWSEPAVITGPTCYLIDVKSVDNDEFNISFIKSNEEN
KTIEIKDLEIFTRYSVVITAFTGNISAAYVEGKSSAEMIVTTLESAPKDPPNNMTFQKIPDEVTKFQLTFLP
PSQPNGNIQVYQALVYREDDPTAVQIHNLSIIQKTNTFVIAMLEGLKGGHTYNISVYAVNSAGAGPKVPMRI
TMDIKAPARPKTKPTPIYDATGKLLVTSTTITIRMPICYYSDDHGPIKNVQVLVTETGAQHDGNVTKWYDAY
FNKARPYFTNEGFPNPPCTEGKTKFSGNEEIYIIGADNACMIPGNEDKICNGPLKPKKQYLFKFRATNIMGQ
PTDSDYSDPVKTLGEGLSERTVEIILSVTLCILSIILLQTAIFAPARIRQKQKEGCTYSPQDAEIIDTKLKL
DQLITVADLELKDERLTRPISKKSFLQUVEELCTNNNLKFQEEFSELPKFLQDLSSTDADLPWNRAKNRFPN
IKPYNNNRVKLIADASVPGSDYINASYISGYLCPNEFIATQGPLPGTVGDFWRMVWETRAKTLVMLTQCFEK
GRIRCHQYWPEDNKPVTVFGDIVITKLMEDVQIDWTIRDLKIERHGDCMTVRQCNFTAWPEHGVPENSAPLI
HFVKLVRASRAHDTTPMIVHCSAGVGRTGVFIALDHLTQHINDHDFVDIYGLVAELRSERMCMVQNLAQYIF
LHQCILDLLSNKGSNQPICFVNYSALQKMDSLDAMEGGDVELEWEETTM

[0083] A search of sequence databases reveals that the NOV2a amino acid sequence has 1894 of 2301 amino acid residues (82%) identical to, and 2078 of 2301 amino acid residues (90%) similar to, the 2302 amino acid residue ptnr:SPTREMBL-ACC:088488 protein from Rattus norvegicus (Rat) (Glomerular Mesangial Cell Receptor Protein-Tyrosine Phosphatase Precursor (EC 3.1.3.48)) (E=0.0). Public amino acid databases include the GenBank databases, SwissProt, PDB and PIR.

[0084] NOV2 is expressed in at least kidney and colon. This information was derived by determining the tissue sources of the sequences that were included in the invention including but not limited to SeqCalling sources, Public EST sources, Literature sources, and/or RACE sources.

[0085] In addition, the sequence is predicted to be expressed in Rattus norvegicus: kidney because of the expression pattern of (GENBANK-ID: gb:GENBANK-ID:AF063249|acc:AF063249.1) a closely related Rattus norvegicus glomerular mesangial cell receptor protein-tyrosine phosphatase precursor (PTPRQ) mRNA, complete cds homolog.

[0086] NOV2b

[0087] A disclosed NOV2b nucleic acid of 2565 nucleotides (also referred to as CG50718-02) encoding a novel Glomerular Mesangial Cell Receptor Protein-Tyrosine-like protein is shown in Table 2C. An open reading frame was identified beginning with an AGA codon at nucleotides 1-3 and ending with a GAG codon at nucleotides 2563-2565. The start and stop codons are in bold letters in Table 2C. Because the first and last codons are not traditional initiation and termination codons, NOV2b could represent a partial reading frame that extends in the 5′ and/or 3′ directions.

TABLE 2C
NOV2b nucleotide sequence.

(SEQ ID NO:7)

AGATCTCCTGAAGGGTTTGTTGGAAACCTGACTTACGAATCCATTTCGTCAACTGCAATAAATGTAAGCTGG
GTCCCACCGGCTCAACCAAACGGTCTAGTCTTCTACTATGTTTCACTGATCTTACAGCAGACTCCTCGCCAT
GTGAGACCACCTCTTGTTACATATGAGAGAAGCATATATTTTGATAATCTGGAAAAATACACTGATTATATA
TTAAAAATTACTCCATCAACAGAAAAGGGATTCTCTGATACCTATACTGCCCAGCTATACATCAAGACTGAA
GAAGATGTCCCAGAAACTTCACCAATAATCAACACTTTTAAAAACCTTTCCTCTACCTCAGTTCTCTTATCA
TGGGATCCCCCAGTAAAGCCAAATGGTGCAATAATAAGTTATGATTTAACTTTACAAGGACCAAATGAAAAT
TATTCTTTCATTACTTCTGATAATTACATAATATTCGAAGAGCTTTCACCATTTACATTATATAGCTTTTTT
GCTGCCGCAAGAACTAGAAAAGGACTTGGTCCTTCCAGTATTCTTTTCTTTTACACAGATGAGTCAGTGCCG
TTAGCACCTCCACAAAATTTGACTTTAATCAACTGTACTTCAGACTTTGTATGGCTCAAATGGAGCCCAAGT
CCTCTTCCAGGTGGTATTGTTAAAGTATATAGTTTTAAAATTCATGAACATGAAACTGACACTATATATTAT
AAGAATATATCAGGATTTAAAACTGAAGCCAAACTTGTTGGACTGGAACCAGTCAGCACCTACTCTATCCGT
GTATCTGCGTTCACCAAAGTTGGAAATGGCAATCAATTTAGTAATGTAGTAAAATTCACAACCCAAGAATCA
GTTCCAGATGTCGTGCAGAATATGCAGTGCATGGCAACTAGCTAACAGTCAGTTTTAGTGAAATGGGATCCA
CCCAAAAAGGCAAATGGAATAATAACGCAGTATATGGTAACAGTTGAAAGGAATTCTACAAAAGTTTCTCCC
CAAGATCACATGTACACTTTCATAAAGCTTCTTGCCAATACCTCATATGTCTTTAAAGTAAGAGCTTCAACC
TCAGCTGGTGAAGGTGATGAAAGCACATGCCATGTCAGCACACTACCTGAAACAGTTCCCAGTGTTCCCACA
AATATTGCTTTTTCTGATGTTCAGTCAACTAGTGCAACATTGACATGGATAAGACCTGACACTATCCTTGGC
TACTTTCAAAATTACAAAATTACCACTCAACTTCGTGCTCAAAAATGCAAAGAATGGGAATCCGAAGAATGT
GTTGAATATCAAAAAATTCAATACCTCTATGAAGCTCACTTAACTGAAGAGACAGTATATGGATTAAAGAAA
TTTAGATGGTATAGATTCCAAGTGGCTGCCAGCACCAATGCTGGCTATGCCAATGCTTCAAACTGGATTTCT
ACAAAAACTCTGCCTGGCCCTCCAGATGGTCCTCCTGAAAATGTTCATGTAGTAGCAACATCACCTTTTAGC
ATCAGCATAAGCTGGACTGAACCTGCTGTCATTACTGGACCAACATGTTATCTGATTGATGTCAAATCGGTA
GATAATGATCAATTTAATAThTCCTTCATCAAGTCAAATGAAGAAAATAAAACCATAGAAATTAAAGATTTA
GAAATATTCACAAGGTATTCTGTAGTGATCACTGCATTTACTCGGAACATTAGTGCTGCATATGTAGAAGGG
AAGTCAAGTGCTCAAATGATTGTTACTACTTTAGAATCAGCCCCAAAGGACCCACCTAACAACATCACATTT
CAGAAGATACCACATGAAGTTACAAAATTTCAATTAACGTCCCTTCCTCCTTCTCAACCTAATGGAAATATC
CAAGTATATCAAGCTCTGGTTTACCGAGAAGATGATCCTACTGCTGTCCACATTCACAACCTCAGTATTATA
CAGAAAACCAACACATTCGTCATTGCAATGCTAGAAGGACTAAAAGGTGGACATACATACAATATCAGTGTT
TACGCAGTCAATAGTGCTGGTGCAGGTCCAAAGGTTCCGATGAGAATAACCATGGATATCAAAGCTCCAGCA
CGACCAAAAACCAAACCAACCCCTATTTATGATGCCACAGGAAAACTGCTTGTGACTTCAACAACAATTACA
ATCAGAATGCCAATATGTTACTACAGTGATGATCATGGACCAATAAAAAATGTACAAGTGCTTGTGACAGAA
ACAGGAGCTCAGCATGATGGAAATGTAACAAAGTGGTATGATGCATATTTTAATAAAGCAAGGCCATATTTT
ACAAATGAAGGCTTTCCTAACCCTCCATGTACAGAAGGAAAGACAAAGTTTAGTGGCAATGAAGAAATCTAC
ATCATAGGTGCTGATAATGCATGCATGATTCCTGGCAATGAAGACAAAATTTGCAATGGACCACTGAAACCA
AAAAAGCAATACTTATTTAAATTTAOAGCTACAAATATTATGGGACAATTTACTGACTCTGATTATTCTGAC
CCTGTTAACACTTTAGGCGAAGGACTTTCAGAAAGAACCCTCGAG

[0088] The disclosed NOV2b polypeptide (SEQ ID NO: 8) encoded by SEQ ID NO: 7 has 855 amino acid residues and is presented in Table 2D using the one-letter amino acid code.

TABLE 2D
Encoded NOV2b protein sequence.

(SEQ ID NO:8)

RSPEGFVGNLTYESISSTAINVSWVPPAQPNGLVFYYVSLILQQTPRHVRPPLVTYERSIYFDNLEKYTDYI
LKITPSTEKGFSDTYTAQLYIKTEEDVPETSPIINTFKNLSSTSVLLSWDPPVKPNGATISYDLTLQGPNEN
YSFITSDNYIILEELSPFTLYSFFAAARTRKGLGPSSILFFYTDESVPLAPPQNLTLINCTSDFVWLKWSPS
PLPGGIVKVYSFKIHEHETDTIYYKNISGFKTEAKLVGLEPVSTYSIRVSAFTKVGNGNQFSNVVKFTTQES
VPDVVQNMQCMATSWQSVLVKWDPPKKANGIITQYMVTVERNSTKVSPQDHMYTFIKLLANTSYVFKVRAST
SAGEGDESTCHVSTLPETVPSVPTNIAFSDVQSTSATLTWIRPDTILGYFQNYKITTQLRAQKCKEWESEEC
VEYQKIQYLYEAHLTEETVYGLKKFRWYRFQVAASTNAGYGNASNWISTKTLPGPPDGPPENVHVVATSPFS
ISISWSEPAVITGPTCYLIDVKSVDNDEFNISFIKSNEENKTIEIKDLEIFTRYSVVITAFTGNISAAYVEG
KSSAEMIVTTLESAPKDPPNNMTFQKTPDEVTKFQLTSLPPSQPNGNIQVYQALVYREDDPTAVQIHNLSII
QKTNTFVIAMLEGLKGOHTYNISVYAVNSAGAGPKVPMRITMDIKAPARPKTKPTPIYDATGKLLVTSTTIT
IRMPICYYSDDHGPIKNVQVLVTETGAQHDGNVTKWYDAYFNXARPYFTNEGFPNPPCTEGKTKFSGNEEIY
IIGADNACMIPGNEDKICNGPLKPKKQYLFKFRATNIMGQFTDSDYSDPVKTLGEGLSERTLE

[0089] NOV2b is expressed in Brain, Colon, Fetal brain, Germ Cell, Heart, Kidney, Prostate, Uterus, brain, breast, colon, kidney, lung.

[0090] NOV2c

[0091] A disclosed NOV2c nucleic acid of 6903 nucleotides (also referred to as CG50718-05) encoding a novel Glomerular Mesangial Cell Receptor Protein-Tyrosine Phosphatase Precursor-like protein is shown in Table 2E. An open reading frame was identified beginning with an ATG initiation codon at nucleotides 1-3 and ending with a TGA codon at nucleotides 6901-6903. A putative untranslated regions upstream from the initiation codon and downstream of the termination codon are underlined in Table 2E. The start and stop codons are in bold letters.

TABLE 2E
NOV2c nucleotide sequence.

(SEQ ID NO:9)

| | |
|---|---|
| ATGGATTTTCTTATCATTTTTCTTTTACTTTTTATTGGGACTTCAGAGACACAGGTAGATGTTTCCAATGTC | |
| GTTCCTGGTACTAGGTACGATATAACCATCTCTTCAATTTCTACAACATACACCTCACCTGTTACTAGAATA | |
| GTGACAACAAATGTAACAGAACCAGGQCCTCCAGTCTTCCTAGCCGGGGAAAGAGTCGGATCTGCTGGGATT | |
| CTTCTGTCTTGGAATACACCACCTAATCCAAATGGAAGGATTATATCTTACATTGTCAAATATAAGGAAGTT | |
| TGTCCGTGGATGCAAACAGTATATACACAAGTCAGATCAAAGCCAGACAGTCTGGAAGTTCTTCTTACTAAT | |
| CTTAATCCTGGAACAACATATGAAATTAAGGTAGCTGCTGAAAACAGTGCTGGCATTGGAGTGTTTAGTGAT | |
| CCATTTCTCTTCCAAACTGCAGAAAGTCCAGCTCCAGGAAAAGTGCTGAATCTCACAGTTGAGGCCTACAAC | |
| GCTTCAGCAGTTAAGCTGATTTGGTATTTACCTCGGCAACCAAATGGCAAAATTACCAOCTTCAAGATTAGT | |
| GTCAAGCATGCCAGAAGTGGGATACTAGTGAAAGATGTCTCAATCAGAGTAGAGGACATTTTGACTGGGAAA | |
| TTGCCAGAATGCAATGTAGAGAATAGTGAATCTTTTTTATGGAGTACAGCCAGCCCTTCTCCAACCCTTGGT | |
| AGAGTTACACCTCCATCGCGTACCACACATTCATCAAGCACGTTGACACAGAATGAGATCAGCTCTGTGTGG | |
| AAAGAGCCTATCAGTTTTGTAGTGACACACTTGAGACCTTATACAACATATCTTTTTGAAGTTTCAGCTGCT | |
| ACAACTGAAGCAGGTTATATTGATAGTACGATTGTCAGAACACCAGAATCAGTGCCTGAAGGACCACCACAA | |
| AACTCCGTAACAGGCAACATCACAGGAAAGTCCTTTTCAATTTTATGGGACCCACCAACTATAGTAACAGGG | |
| AAATTTAGTTATAGAGTTGAATTATATGGACCATCAGGTCGCATTTTGGATAACAGCACAAAAGACCTCAAG | |
| TTTGCATTCACTAACCTAACACCATTTACAATCTATGATGTCTATATTGCGGCTGAAACCAGTGCAGGGACT | |
| GGGCCCAAGTCAAATATTTCAGTATTCACTCCACCAGATGTTCCAGGGGCAGTGTTTGATTTACAACTTGCA | |
| GAGGTAGAATCCACGCAAGTAAGAATTACTTGGAAGAAACCACGACAACCAAATGGAATTATTAACCAATAC | |
| CGAGTGAAAGTGCTAGTTCCAGAGACAGGAATAATTTTGGAAAATACTTTGCTCACTGGAAATAATGAGATA | |
| AATGACCCCATGGCTCCAGAAATTGTGAACATAGTAGAGCCAATGGTAGGATTATATGAGGGTTCAGCAGAG | |
| ATGTCGTCTGACCTTCACTCACTTCCTACATTTATATATAACAGCCATCCAGATAAAAACTTTCCTGCAAGG | |
| AATAGAGCTGAAGACCAGACTTCACCAGTTGTAACTACAAGGAATCAGTATATTACTGACATTGCAGCTGAA | |
| CAGCTGTCTTATGTTATCAGGAGACTTGTACCTTTCACTGAGCACATGATTAGTGTATCTGCTTTCACCATC | |
| ATGGGAGAAGGACCACCAACAGTTCTCAGTGTTAGGACACGTCAGCAAGTGCCAAGCTCCATTAAAATTATA | |
| AACTATAAAAATATTAGTTCTTCATCTATTTTGTTATATTGGGATCCTCCAGAATATCCCAATGGAAAAATA | |
| ACTCACTATACGATTTATGCAATGGAATTGGATACAAACAGAGCATTCCAGATAACTACCATAGATAACAGC | |
| TTTCTCATAACAGGTATAGGGTTAAAGAAATACACAAAATACAAAATGAGAGTGGCAGCCTCAACCCACGTT | |
| GGAGAAAGTTCTTTGTCTGAAGAAAATGACATCTTTGTGAGAACTTCAGAAGATGAACCGGAATCATCACCT | |
| CAAGATGTCGAAGTAATTGATGTTACCGCAGATGAAATAAGGTTGAAGTGGTCACCACCCGAAAACCCCAAT | |
| GGGATCATTATTGCTTATGAAGTGCTATATAAAAATATAGATACTTTATATATGAAGAACACATCAACAACA | |
| GACATAATATTAAGGAACTTAAGACCTCACACCCTCTATAACATTTCTGTAAGGTCTTACACCAGATTTGGT | |
| CATCGCAATCAGGTATCTTCTTTACTCTCTGTAAGGACTTCGGAGACTGTGCCTGATAGTGCACCAGAAAAT | |
| ATCACTTACAAAAATATTTCTTCTGGAGAGATTGAGCTATCATTCCTTCCCCCAAGTAGTCCCAATGGAATC | |
| ATACAAAAATATACAATTTATCTCAAGAGAAGTAATGGAAATGAGGAAAGAACTATAAATACAACCTCTTTA | |
| ACCCAAAACATTCTGAAGAAATATACCCAATATATCATTGAGGTGTCTGCTAOTACACTCAAAGGTGAAGGA | |
| GTTCGGAGTGCTCCCATAAGTATACTGACGGAGGAAGATGCTCCTGATTCTCCCCCTCAACACTTCTCTGTA | |
| AAACAGTTGTCTGGTGTCACGGTGAAGTTGTCATGGCAACCACCCCTGGAGCCAAATGCAATTATCCTTTAT | |
| TACACAGTTTATGTCTGGAGGAATAGATCATCATTAAAAACTATTAATGTCACTGAAACATCATTGGAGTTA | |
| TCAGATTTGGATTATAATGTTCAATACAGTGCTTATGTAACAGCTAGCACCAGATTTGGTGATGGGAAAACA | |
| AGAAGCAATATCATTACCTTTCAAACACCAGAGGGACCAAGCGATCCTCCCAAAGATGTTTATTATGCAAAC | |
| CTCAGTTCTTCATCAATAATTCTTTTCTGGACACCTCCTTCAAAACCTAATGGGATTATACAATATTACTCT | |
| GTTTATTACAGAAATACTTCAGGTACTTTTATGCAGAATTTTACACTCCATGAAGTAACCAATGACTTTGAC | |
| AATATGACTGTATCCACAATTATAGATAAACTGACAATATTCAGCTACTATACATTTTCGTTAACAGCAAGT | |
| ACTTCAGTTGGAAATGGGAATAAAAGCAGTGACATCATTGAAGTATACACAGATCAAGACGTCCCTGAAGGG | |
| TTTGTTGGAAACCTGACTTACGAATCCATTTCGTCAACTGCAATAAATGTAACCTGGGTCCCACCCGCTCAA | |
| CCAAACGGTCTAGTCTTCTACTATGTTTCACTGATCTTACAGCAGACTCCTCGCCATGTGAGACCACCTCTT | |
| GTTACATATGAGAGAAGCATATATTTTGATAATCTCGAAAAATACACTGATPATATATTAAAAATTACTCCA | |
| TCAACAGAAAAGGGATTCTCTGAThCCTATACTGCCCAGCTATACATCAAGACTGAAGAAGATGTCCCAGAA | |
| ACTTCACCAATAATCAACACTTTTAAAAACCTTTCCTCTACCTCAGTTCTCTTATCATGGGATCCCCCAGTA | |
| AAGCCAAATGGTGCAATAATAAGTTATGATTTAACTTTACAAGGACCAAATGAAAATTATTCTTTCATTACT | |
| TCTGATAATTACATAATATTGGAAGAGCTTTCACCATTTACATTATATAGCTTTTTTGCTGCCGCAAGAACT | |
| AGAAAAGGACTTGGTCCTTCCAGTATTCTTTTCTTTTACACAGATGAGTCAGTGCCGTTAGCACCTCCACAA | |
| AATTTGACTTTAATCAACTGTACTTCAGACTTTGTATGGCTGAAATGGAGCCCAAGTCCTCTTCCAGGTGGT | |
| ATTGTTAAAGTATATAGTTTTAAAATTCATGAACATGAAACTGACACTATATATTATAAGAATATATCAGGA | |
| TTTAAAACTGAAGCCAAACTTGTTGGACTGGAACCAGTCAGCACCTACTCTATCCGTGTATCTGCGTTCACC | |
| AAAGTTGGAAATGGCAATCAATTTAGTAATGTAGTAAAATTCACAACCCAAGAATCAGTTCCAGATGTCGTG | |
| CAGAATATGCAGTGCATGGCAACTAGCTGGCAGTCAGTTTTAGTGAAATGGGATCCACCCAAAAAGGCAAAT | |
| GGAATAATAACGCAGTATATGGTAACAGTTGAAAGGAATTCTACAAAAGTTTCTCCCCAAGATCACATGTAC | |
| ACTTTCATAAAGCTTCTTGCCAATACCTCATATGTCTTTAAAGTAAGAGCTTCAACCTCAGCTGGTGAAGGT | |
| GATGAAAGCACATGCCATGTCAGCACACTACCTGAAACAGTTCCCAGTGTTCCCACAAATATTGCTTTTTCT | |
| GATGTTCAGTCAACTAGTGCAACATTGACATGGATAAGACCTGACACTATCCTTGGCTACTTTCAAAATTAC | |
| AAAATTACCACTCAACTTCGTGCTCAAAAATGCAAAGAATGGGAATCCGAAGAATGTGTTGAATATCAAAAA | |
| ATTCAATACCTCTATGAAGCTCACTTAACTGAAGAGACAGTATATGGATTAAAGAAATTTAGATGGTATAGA | |
| TTCCAAGTGGCTGCCAGCACCAATGCTGGCTATGGCAATGCTTCAAACTGGATTTCTACAAAAACTCTGCCT | |
| GGCCCTCCAGATGGTCCTCCTGAAAATGTTCATGTAGTAGCAACATCACCTTTTACCATCAGCATAAGCTGG | |
| AGTGAACCTGCTGTCATTACTGGACCAACATGTTATCTGATTGATGTCAAATCGGTAGATAATGATGAATTT | |
| AATATATCCTTCATCAAGTCAAATGAAGAAAATAAAACCATAGAAATTAAAGATTTAGAAATATTCACAAGG | |
| TATTCTGTAGTGATCACTGCATTTACTGGGAACATTAGTGCTGCATATGTAGAAGGGAAGTCAAGTGCTGAA | |
| ATGATTGTTACTACTTTAGAATCAGCCCCAAAGGACCCACCTAACAACATGACATTTCAGAAGATACCAGAT | |
| CAAGTTACAAAATTTCAATTAACGTCCCTTCCTCCTTCTCAACCTAATGGAAATATCCAAGTATATCAAGCT | |
| CTGGTTTACCGAGAAGATGATCCTACTGCTGTCCAGATTCACAACCTCAGTATTATACAGAAAACCAACACA | |
| TTCGTCATTGCAATGCTAGAAGGACTAMAGGTGGACATACATACAATATCAGTGTTTACGCAGTCAATAGAA | |
| GCTGGTGCAGGTCCAAAGGTTCCGATGAGAATAACCATGGATATCAAAGCTCCAGCACGACCAAAAACCAAA | |
| CCAACCCCTATTTATGATGCCACAGGAAAACTGCTTGTGACTTCAACAACAATTACAATCAGAATGCCAATA | |
| TGTTACTACAGTGATGATCATGGACCAATAAAAAATGTACAAGTGCTTCTGACAGAAACAGGACCTCAGCAT | |
| GATGGAAATGTAACAAAGTGGTATGATGCATATTTTAATAAAGCAAGGCCATATTTTACAAATGAAGGCTTT | AA |
| CCTAACCCTCCATGTACAGAAGGAAAGACAAAGTTTAGTGGCAATGAAGAAATCTACATCATAGGTGCTGAT | |
| AATGCATGCATGATTCCTGGCAATGAAGACAAAATTTGCAATGGACCACTGAAACCAAAAAAGCAATACTTA | |
| TTTAAATTTAGAGCTACAAATATTATGGGACAATTTACTGACTCTGATTATTCTGACCCTGTTAAGACTTTA | |
| GGCGAAGCACTTTCAGAAAGAACCCTAGAGATCATTCTTTCCGTCACTTTGTGTATCCTTTCAATAATTCTC | |
| CTTGGAACAGCTATTTTTGCATTTGCAAGAATTCGACAGAAGCAGAAAGAAGGTGGCACATACTCTCCTCAG | |
| GATGCAGAAATTATTGACACTAAATTGAAGCTGGATCAGCTCATCACAGTGGCAGACCTGGAACTGAAGGAC | |
| GAGAGATTAACGCGGTTACTTAGTTATAGAAAATCCATCAAGCCAATAAGCAAGAAATCCTTCCTGCAACAT | |
| GTTGAAGAGCTTTGCACAAACAACAACCTAAAGTTTCAAGAAGAATTTTCGGAATTACCAAAATTTCTTCAG | |
| GATCTTTCTTCAACTGATGCTGATCTGCCTTGGAATAGAGCAAAAAACCGCTTCCCAAACATAAAACCATAT | |
| AATAATAACAGAGTAAAGCTGATAGCTGACGCTAGTGTTCCAGGTTCGGATTATATTAATGCCAGCTATATT | |
| TCTGGTTATTTATGTCCAAATGAATTTATTGCTACTCAAGGTCCACTACCAAAAACAGTTGGAGATTTTTAA | |
| AGAATGGTGTGGGAAACCAGAGCAAAAACATTAGTAATGCTAACACAGTGTTTTGAAAAAGGACGGATCAGA | |
| TGCCATCAGTATTCGCCAGAGGACAACAAGCCAGTTACTGTCTTTGGAGATATAGTGATTACAAGCTIAATG | |
| GAGGATGTTCAAATAGATTGGACTATCAGGGATCTGAAAATTGAAAGGCATGGCGATTGCATGACTGTTCGA | |
| CAGTGTAACTTTACTGCCTGGCCAGAGCATGGGGTTCCTCAGAACAGCGCCCCTCTAATTCACTTTGTGAAG | |
| TTGGTTCGAGCAAGCAGGGCACATGACACCACACCTATGATTGTTCACTGTAGTGCTGGAGTTGGAAGAACT | |
| GGAGTTTTTATTGCTCTGGACCATTTAACACAACATATAAATGACCATGATTTTGTGGATATATATGGACTA | |
| GTACCTGAACTGAGAAGTGAAAGAATGTGCATGGTGCAGAATCTGGCACAGTATATCTTTTTACACCAGTGC | |
| ATTCTGGATCTCTTATCAATAAAGGGAAGTATCAGCCCATCTGTTTTGTTAACTATTCAGCACTTCAGPAAG | |
| ATGGACTCTTTGGACGCCATGGAAGGTGATGTTCAGCTTGAATGGG1XAGAACCACTATGTAA | |

[0092] In a search of public sequence databases, the NOV2c nucleic acid sequence, located on chromsome 12 has 5903 of 6906 bases (85%) identical to a gb:GENBANK-ID:AF063249|acc:AF063249.1 mRNA from Rattus norvegicus (Rattus norvegicus glomerular mesangial cell receptor protein-tyrosine phosphatase precursor (PTPRQ) mRNA, complete cds) (E=0.0). Public nucleotide databases include all GenBank databases and the GeneSeq patent database.

[0093] The disclosed NOV2c polypeptide (SEQ ID NO: 10) encoded by SEQ ID NO: 9 has 2300 amino acid residues and is presented in Table 2F using the one-letter amino acid code. Signal P, Psort and/or Hydropathy results predict that NOV2c has a signal peptide and is likely to be localized in the plasma membrane with a certainty of 0.4600. In other embodiments, NOV2c may also be localized to the microbody (peroxisome) with acertainty of 0.1260, the endoplasmic reticulum (membrane) with a certainty of 0.1000 or in the endoplasmic reticulum (lumen) with a certainty of 0.1000. The most likely cleavage site for a NOV2c peptide is between amino acids 17 and 18, at: SET-QV.

TABLE 2F
Encoded NOV2c protein sequence.

(SEQ ID NO:10)

MDFLIIFLLLFIGTSETQVDVSNVVPGTRYDITISSISTTYTSPVTRIVTTNVTEPGPPVFLAGERVGSAGI
LLSWNTPPNPNGRIISYIVKYKEVCPWMQTVYTQVRSKPDSLEVLLTNLNPGTTYEIKVAAENSAGIGVFSD
PFLFQTAESPAPGKVVNLTVEAYNASAVKLIWYLPRQPNGKITSFKISVKHARSGIVVKDVSIRVEDILTGK
LPECNVENSESFLWSTASPSPTLGRVTPPSRTTHSSSTLTQNEISSVWKEPISFVVTHLRPYTTYLFEVSAA
TTEAGYIDSTIVRTPESVPEGPPQNCVTGNITGKSFSILWDPPTIVTGKFSYRVELYGPSGRILDNSTKDLK
FAFTNLTPFTMYDVYIAAETSAGTGPKSNISVFTPPDVPGAVFDLQLAEVESTQVRITWKKPRQPNGIINQY
RVKVLVPETGIILENTLLTGNNETNDPMAPEIVNIVEPMVGLYEGSAEMSSDLHSLATFIYNSHPDKNFPAR
NRAEDQTSPVVTTRNQYITDIAAEQLSYVIRRLVPFTEHMISVSAFTIMGEGPPTVLSVRTRQQVPSSIKII
NYKNISSSSILLYWDPPEYPNGKITHYTIYAMELDTNRAFQITTIDNSFLITGIGLKKYTKYKMRVAASTHV
GESSLSEENDIFVRTSEDEPESSPQDVEVIDVTADEIRLKWSPPEKPNGIIIAYEVLYKNIDTLYMKNTSTT
DIILRNLRPHTLYNISVRSYTREGHGNQVSSLLSVRTSETVPDSAPENITYKNISSGEIELSFLPPSSPNGI
IQKYTIYLKRSNGNEERTINTTSLTQNILKKYTQYIIEVSASTLKGEGVRSAPISILTEEDAPDSPPQDFSV
KQLSGVTVKLSWQPPLEPNGIILYYTVYVWRNRSSLKTINVTETSLELSDLDYNVEYSAYVTASTRFGDGKT
RSNIISFQTPEGPSDPPKDVYYANLSSSSIILFWTPPSKPNGIIQYYSVYYRNTSGTFMQNFTLHEVTHDFD
NMTVSTIIDKLTIFSYYTFWLTASTSVCNGNKSSDIIEVYTDQDVPEGFVGNLTYESISSTAINVSWVPPAQ
PNGLVFYYVSLILQQTPRHVRPPLVTYERSIYFDNLEKYTDYILKITPSTEKGFSDTYTAQLYIKTEEDVPE
TSPIINTFKNLSSTSVLLSWDPPVKPNGAIISYDLTLQGPNENYSFITSDNYIILEELSPFTLYSFFAAART
RKGLGPSSILFFYTDESVPLAPPQNLTLINCTSDFVWLKWSPSPLPGGIVKVYSFKIHEHETDTIYYKNISG
FKTEAKLVGLEPVSTYSIRVSAETKVGNGNQFSNVVKFTTQESVPDVVQNMQCMATSWQSVLVKWDPPKKAN
GIITQYMVTVERNSTKVSPQDHMYTFIKLLANTSYVFKVRASTSAGEGDESTCHVSTLPETVPSVPTNIAFS
DVQSTSATLTWIRPDTILGYFQNYKITTQLRAQKCKEWESEECVEYQKIQYLYEAHLTEETVYGLKKFRWYR
FQVAASTNAGYGNASNWISTKTLPGPPDGPPENVHVVATSPFSISISWSEPAVITGPTCYLIDVKSVDNDEF
NISFIKSNEENKTIEIKDLEIFTRYSVVITAFTGNISAAYVEGKSSAEMIVTTLESAPKDPPNNMTFQKIPD
EVTKEQLTSLPPSQPNGNIQVYQALVYREDDPTAVQIHNLSIIQKTNTFVIAMLEGLKGGHTYNISVYAVNS
AGAGPKVPMRITMDIKAPARPKTKPTPIYDATGKLLVTSTTITIRMPICYYSDDHGPIKNVQVLVTETGAQH
DGNVTKWYDAYFNKARPYFTNEGFPNPPCTEGKTKFSGNEETYIIGADNACMIPCNEDKICNGPLKPKKQYL
FKFRATNIMGQFTDSDYSDPVKTLGEGLSERTLEIILSVTLCILSIILLGTAIFAFARIRQKQKEGGTYSPQ
DAEIIDTKLKLDQLITVADLELKDERLTRLLSYRKSIKPISKKSFLQHVEELCTNNNLKFQEEFSELPKFLQ
DLSSTDADLPWNRAKNRFPNIKPYNNNRVKLIADASVPGSDYINASYTSGYLCPNEFIATQGPLPGTVGDFW
RMVWETRAKTLVMLTQCFEKGRIRCHQYWPEDNKPVTVFGDIVITKLMEDVQIDWTIRDLKIERHGDCMTVR
QCNFTAWPEHGVPENSAPLIHFVKLVRASRAHDTTPMIVHCSAGVGRTGVFIALDHLTQHINDHDFVDIYGL
VAELRSERMCMVQNLAQYIFLHQCILDLLSNKGSNQPICFVNYSALQKMDSLDAMEGDVELEWEETTM

[0094] A search of sequence databases reveals that the NOV2c amino acid sequence has 1988 of 2301 amino acid residues (86%) identical to, and 2151 of 2301 amino acid residues (93%) similar to, the 2302 amino acid residue ptnr:SPTREMBL-ACC:088488 protein from Rattus norvegicus (Rat) (Glomerular Mesangial Cell Receptor Protein-Tyrosine Phosphatase Precursor (EC 3.1.3.48)) (E=0.0). Public amino acid databases include the GenBank databases, SwissProt, PDB and PIR.

[0095] NOV2c is expressed in at least Synovium/Synovial membrane, Kidney. Expression information was derived from the tissue sources of the sequences that were included in the derivation of the sequence of CuraGen Acc. No. CG50718-05. The sequence is predicted to be expressed in the Rattus norvegicus: glomerular mesangial. because of the expression pattern of (GENBANK-ID: gb:GENBANK-ID:AF063249|acc:AF063249.1) a closely related Rattus norvegicus glomerular mesangial cell receptor protein-tyrosine phosphatase precursor (PTPRQ) mRNA, complete cds homolog.

[0096] Homologies among each of the above NOV2 proteins will be shared by the other NOV2 proteins insofar as they are homologous to each other as shown below in Table 2G. Any reference to NOV2 is assumed to refer to all three of the NOV2 proteins in general, unless otherwise noted.

[image]

[image]

[image]

[image]

[0097] The disclosed NOV2a polypeptide has homology to the amino acid sequences shown in the BLASTP data listed in Table 2H.

TABLE 2H
BLAST results for NOV2a

| Gene Index/ | | | Identity | Positives | |
|---|---|---|---|---|---|
| Identifier | Protein/Organism | Length (aa) | (%) | (%) | Expect |
| gi\|12621078\|ref\|NP_{—} | protein tyrosine | 2302 | 1893/2306 | 2077/2306 | 0.0 |
| 075214.1\| | phosphatase, | | (82%) | (89%) | |
| (NM_022925) | receptor type, Q | | | | |
| | [Rattus | | | | |
| | norvegicus] | | | | |
| gi\|125977\|sp\|P16621\| | PROTEIN-TYROSINE | 2029 | 410/1587 | 680/1587 | 1e−94 |
| LAR_DROME | PHOSPHATASE DLAR | | (25%) | (42%) | |
| | PRECURSOR | | | | |
| | (PROTEIN- | | | | |
| | TYROSINE- | | | | |
| | PHOSPHATE | | | | |
| | PHOSPHOHYDROLASE) | | | | |
| gi\|10728878\|gb\|AAF53837.2\| | Lar gene product | 2037 | 410/1587 | 680/1587 | 2e−94 |
| (AE003663) | [Drosophila | | (25%) | (42%) | |
| | melanogaster] | | | | |
| gi\|7290546\|gb\|AAF45998.1\| | Ptp4E gene | 1767 | 417/1645 | 694/1645 | 8e−94 |
| (AE003432) | product | | (25%) | (41%) | |
| | [Drosophila | | | | |
| | melanogaster] | | | | |
| gi\|1362625\|pir\|\|A49502 | protein-tyrosine- | 1767 | 416/1645 | 693/1645 | 1e−92 |
| | phosphatase (EC | | (25%) | (41%) | |
| | 3.1.3.48), | | | | |
| | receptor type 4E, | | | | |
| | splice form A | | | | |
| | precursor - fruit | | | | |
| | fly (Drosophila | | | | |
| | melanogaster) | | | | |

[0098] The homology between these and other sequences is shown graphically in the ClustalW analysis shown in Table 2I. In the ClustalW alignment of the NOV2 proteins, as well as all other ClustalW analyses herein, the black outlined amino acid residues indicate regions of conserved sequence (i.e., regions that may be required to preserve structural or functional properties), whereas non-highlighted amino acid residues are less conserved and can potentially be altered to a much broader extent without altering protein structure or function.

[image]

[image]

[image]

[image]

[image]

[image]

[image]

[image]

[0099] Tables 2J-2EE list the domain descriptions from DOMAIN analysis results against NOV2a. This indicates that the NOV2a sequence has properties similar to those of other proteins known to contain this domain.

TABLE 2J
Domain Analysis of NOV2a

gn1|Smart|smart00194, PTPc, Protein tyrosine phosphatase, catalytic
domain (SEQ ID NO:93)
CD-Length = 264 residues, 99.6% aligned
Score = 318 bits (816), Expect = 2e−87

| | | | |
|---|---|---|---|
| NOV 1: | 1983 | KFQEEFSELPK-FLQDLSSTDADLPWNRAKNRFPNIKPYNNNRVKLIADASVPGSDYINA | 2041 |
| | | +\|\|\| +\| + \|\|\| \| \| \|\| \|\| \|\|\|+ ++ \|\|++ \|\|\|\| \|\|\|\|\|\|\| | |
| Sbjct: | 1 | GLEEEFEKLQRLTPDDLSCTVAILPENRDKNRYKDVLPYDHTRVKL-KPPPGEGSDYINA | 59 |
| NOV 1: | 2042 | SYISGYLCPNEFIATQGPLPGTVGDFWRMVWETRAKTLVMLTQCFEKGRIRCHQYWPEDN | 2101 |
| | | \|\|\| \| \| +\|\|\|\|\|\|\|\| \|\| \|\|\|\|\|\|\|\| + +\|\|\|\|+ \|\|\|\| +\| \|\|\|\|\| | |
| Sbjct: | 60 | SYIDGPNRPKAYIATQGPLPSTVEDFWRMVWEEKVPVIVMLTELVEKGREKCAQYWPEKE | 119 |
| NOV 1: | 2102 | KPVTVFGDIVITKLMEDVQIDWTIRDLKIERHG--DCMTVRQCNFTAWPEHGVPENSAPL | 2159 |
| | | +\|\|\| +\| + \|+\|\|\| \|++ \| + \|\| ++\| \|\|+\|\|\|\|\|+ \| | |
| Sbjct: | 120 | GGSLTYGDITVTLKSVEKVDDYTIRTLEVTNTGCSETRTVTHYHYTNWPDHGVPESPKSL | 179 |
| NOV 1: | 2160 | IHFVKLVRASRAH--DTTPMIVHCSAGVGRTGVFIALDHLTQHINDHDFVDIYGLVAELR | 2217 |
| | | + \|+ \|\| \|++ ++ \|++\|\|\|\|\|\|\|\|\|\|\| \|\|\|+\| \| \| + \|\|\|+ +\| \|\|\| | |
| Sbjct: | 180 | LDLVRAVRKSQSTLRNSGPIVVHCSAGVORTGTFIAIDILLQQLEAGKEVDIFEIVICELR | 239 |
| NOV 1: | 2218 | SERMCMVQNLAQYIFLHQCILDLL 2241 | |
| | | \|+\| \|\|\| \|\|\|\|\|++ \|\|+ \| | |
| Sbjct: | 240 | SQRPGMVQTEEQYIFLYRAILEYL 263 | |

[0100] TABLE 2K

Domain Analysis of NOV2a

gnl|Pfam|pfam00102, Y_phosphatase, Protein-tyrosine phosphatase (SEQ ID NO:94)
CD-Length = 235 residues, 100.0% aligned
Score = 275 bits (704), Expect = 2e−74

| | | | |
|---|---|---|---|
| NOV1: | 2008 | NRAKNRFPNIKPYNNNRVKLIADASVPGSDYINASYISGYLCPNEFIATQGPLPGTVGDF | 2067 |
| | | \|+ \|\|\|+ ++ \|\|++ \|\|\|\| \|\|\|\|\|\|\|\|+ \|\| \| +\|\|\|\|\|\|\|\| \|+ \|\| | |
| Sbjct: | 1 | NKEKNRYKDVLPYDHTRVKL-KPLGDEDSDYINASYVDGYKKPKAYIATQGPLPNTIEDF | 59 |
| NOV1: | 2068 | WRMVWETRAKTLVMLTQCFEKGRIRCHQYWPEDNKPVTVFGDI-VITKLMEDVQIDWTIR | 2126 |
| | | \|\|\|\|\|\| + + +\|\|\|\|+ \|\|\|\| +\| \|\|\|\|\| +\|\| \| +\| + \|+\|+\| | |
| Sbjct: | 60 | WRMVWEEKVRVIVMLTELVEKGREKCAQYWPEKEGGSLTYGDFTVTCVSVEKKKDDYTVR | 119 |
| NOV1: | 2127 | DLKIERHGDC--MTVRQCNFTAWPEHGVPENSAPLIHFVKLVRASRAH-DTTPMIVHCSA | 2183 |
| | | \|++ \|\| \|\|+ ++\| \|\|+\|\|\|\|\|+ ++ ++ \|\| \|+ \| \|++\|\|\|\|\| | |
| Sbjct: | 120 | TLELTNSGDDETRTVKHYHYTGWPDHGVPESPKSILDLLRKVRKSKGTPDDGPIVVHCSA | 179 |
| NOV1: | 2184 | GVGRTGVFIALDHLTQHINDHDFVDIYGLVAELRSERMCMVQNLAQYIFLHQCILD | 2239 |
| | | \|+\|\|\|\| \|\|\|+\| \| \| + \|\|++ \| +\|\|\|+\| \|\|\| \|\|\|\|++ \|\|+ | |
| Sbjct: | 180 | GIGRTGTFIAIDILLQQLEKEGVVDVFDTVKKLRSQRPGMVQTEEQYTFIYDAILE | 235 |

[0101] TABLE 2L

Domain Analysis of NOV2a

gnl|Smart|smart00404, PTPc_motif, Protein tyrosine phosphatase, catalytic
domain motif (SEQ ID NO:95)
CD-Length = 105 residues, 100.0% aligned
Score = 120 bits (301), Expect = 8e−28

| | | | |
|---|---|---|---|
| NOV 1: | 2138 | TVRQCNFTAWPEHGVPENSAPLIHFVKLVRASRAH--DTTPMIVHCSAGVGRTGVFIALD | 2195 |
| | | \|\|+ ++\| \|\|+\|\|\|\|\|+ ++ \|++ \|+ \| + \|++\|\|\|\|\|\|\|\|\|\|\| \|+\|+\| | |
| Sbjct: | 1 | TVKHYHYTGWPDHGVPESPDSILEFLRAVKKSLNKSANNGPVVVHCSAGVGRTGTFVAID | 60 |
| NOV 1: | 2196 | HLTQHI-NDHDFVDIYGLVAELRSERMCMVQNLAQYIFLHQCILD | 2239 |
| | | \| \| + \|\|\|+ +\| \|\|\|\|+\| \|\| \| \|\|+\|\|++ +\|+ | |
| Sbjct: | 61 | ILLQQLEAGTGEVDIFDIVKELRSQRPGAVQTLEQYLFLYRALLE | 105 |

[0102] TABLE 2M

Domain Analysis of NOV2a

gnl|Pfam|pfam00041, fn3, Fibronectin type III domain (SEQ ID NO:96)
CD-Length = 86 residues, 100.0% aligned
Score = 60.8 bits (146), Expect = 8e−10

| | | | |
|---|---|---|---|
| NOV 1: | 54 | PGPPVFLAGERVGSAGILLSWNTPPNPNGRIISYIVKYKEVCPWMQTVYTQVRSKPDSLE | 113 |
| | | \| \| \| \| \| + \|\|\|+ \|\|+ \|\| \| \| \|+\|+ \| + ++ + | |
| Sbjct: | 1 | PSAPTNLTVTDVTSTSLTLSWSPPPDGNGPITGYEVEYQPVNS--GEEWNEITVPGTTTS | 58 |
| NOV 1: | 114 | VLLTNLNPGTTYEIKVAAENSAGIGVFS 141 | |
| | | \|\| \| \|\|\| \|\|++\| \| \| \| \| \| | |
| Sbjct: | 59 | YTLTGLKPGTEYEVRVQAVNGGGNGPPS 86 | |

[0103] TABLE 2N

Domain Analysis of NOV2a

gnl|Pfam|pfam00041, fn3, Fibronectin type III domain (SEQ ID NO:96)
CD-Length = 86 residues, 95.3% aligned
Score = 58.9 bits (141), Expect = 3e−09

| | | | |
|---|---|---|---|
| NOV 1: | 659 | SSPQDVEVIDVTADEIRLKWSPPEKPNGIIIAYEVLYKNIDTLYMKNT-----STTDIIL | 713 |
| | | \|+\| ++ \| \|\|\|+ + \| \|\|\|\| \|\| \| \|\|\| \|+ +++ \| +\|\| \| | |
| Sbjct: | 2 | SAPTNLTVTDVTSTSLTLSWSPPPDGNGPITGYEVEYQPVNSGEEWNEITVPGTTTSYTL | 61 |
| NOV 1: | 714 | RNLRPHTLYNISVRSYTRFGHG 735 | |
| | | \|+\| \| \| + \|++ \|+\| | |
| Sbjct: | 62 | TGLKPGTEYEVRVQAVNGGGNG 83 | |

[0104] TABLE 2O

Domain Analysis of NOV2a

gnl|Pfam|pfam00041, fn3, Fibronectin type III domain (SEQ ID NO:96)
CD-Length = 86 residues, 100.0% aligned
Score = 57.0 bits (136), Expect = 1e−08

| | | | |
|---|---|---|---|
| NOV 1: | 1330 | PDVVQNMQCMATSWQSVLVKWDPPKKANGIITQYMVTV-------ERNSTKVSPQDHMYT | 1382 |
| | | \| \|+ + \|+ + \| \|\| \|\| \|\| \| \| \| \| \| \|\| | |
| Sbjct: | 1 | PSAPTNLTVTDVTSTSLTLSWSPPPDGNGPITGYEVEYQPVNSGEEWNEITVPGTTTSYT | 60 |
| NOV1: | 1383 | FIKLLANTSYVFKVRASTSAGEGDES 1408 | |
| | | \| \| \| +\|+\| \| \| \| | |
| Sbjct: | 61 | LTGLKPGTEYEVRVQAVNGGGNGPPS 86 | |

[0105] TABLE 2P

Domain Analysis of NOV2a

gnl|Pfam|pfam00041, fn3, Fibronectin type III domain (SEQ ID NO:96)
CD-Length = 86 residues, 98.8% aligned
Score = 53.1 bits (126), Expect = 2e−07

| | | | |
|---|---|---|---|
| NOV 1: | 753 | SAPENITYKNISSGEIELSFLPPSSPNGIIQKYTIYLKRSNGNE---ERTINTTSLTQNI | 809 |
| | | \|\|\| \|+\| +++\| + \|\|+ \|\| \|\| \| \| + + \| \| \| \|+ \|+ + + | |
| Sbjct: | 2 | SAPTNLTVTDVTSTSLTLSWSPPPDNGPITGYEVEYQPVNSGEEWNEITVPGTTTSYTL | 61 |
| NOV 1: | 810 | KGLKKYTQYIIEVSASTLKGEGVRS 834 | |
| | | \|\|\| \|+\| + \| \| \| \| \| | |
| Sbjct: | 62 | TGLKPGTEYEVRVQAVNGGGNGPPS 86 | |

[0106] TABLE 2Q

Domain Analysis of NOV2a

gnl|Pfam|pfam00041, fn3, Fibronectin type III domain (SEQ ID NO:96)
CD-Length = 86 residues, 95.3% aligned
Score = 52.4 bits (124), Expect = 3e−07

| | | | |
|---|---|---|---|
| NOV 1: | 848 | SPPQDFSVKQLSGVTVKLSWQPPLEPNGIILYYTVYVWR----SSLKTINV--TETSLEL | 901 |
| | | \| \| + +\| ++ ++ \|\|\| \|\| + \|\| \| \| \| \| \| \| \|\| \| | |
| Sbjct: | 2 | SAPTNLTVTDVTSTSLTLSWSPPPDGNGPITGYEVEYQPVNSGEEWNEITVPGTTTSYTL | 61 |
| NOV 1: | 902 | SDLDYNVEYSAYVTASTRFGDG 923 | |
| | | + \| \|\| \| \| \|+\| | |
| Sbjct: | 62 | TGLKPGTEYEVRVQAVNGGGNG 83 | |

[0107] TABLE 2R

Domain Analysis of NOV2a

gnl|Pfam|pfam00041, fn3, Fibronectin type III domain (SEQ ID NO:96)
CD-Length = 86 residues, 91.9% aligned
Score = 51.6 bits (122), Expect = 5e−07

| | | | |
|---|---|---|---|
| NOV 1: | 1148 | TFKNLSSTSVLLSWDPPVKPNGAIISYDLTLQGPNENYSFIT-----SDNYIILEELSPF | 1202 |
| | | \| +++\|\|\|+ \|\|\| \|\| \|\| \| \|++ \| \| + + \| \| \| | |
| Sbjct: | 8 | TVTDVTSTSLTLSWSPPPDGNGPITGYEVEYQPVNSGEEWNEITVPGTTTSYTLTGLKPG | 67 |
| NOV1: | 1203 | TLYSFFAAARTRKGLGPSS 1221 | |
| | | \| \| \| \| \|\| \| | |
| Sbjct: | 68 | TEYEVRVQAVNGGGNGPPS 86 | |

[0108] TABLE 2S

Domain Analysis of NOV2a

gnl|Pfam|pfam00041, fn3, Fibronectin type III domain (SEQ ID NO:96)
CD-Length = 86 residues, 94.2% aligned
Score = 51.2 bits (121), Expect=6e−07

| | | | |
|---|---|---|---|
| NOV 1: | 1235 | PPQNLTLINCTSDFVWLKWSPSPLPGGIVKVYSFK-IHEHETDTIYYKNISGFKTEAKLV | 1293 |
| | | \| \|\|\|+ + \|\| + \| \|\|\| \| \| + \| + + + + \| \| \| | |
| Sbjct: | 3 | APTNLTVTDVTSTSLTLSWSPPPDGNGPITGYEVEYQPVNSGEEWNEITVPGTTTSYTLT | 62 |
| NOV 1: | 1294 | GLEPVSTYSIRVSAFTKVGNG 1314 | |
| | | \|\|+\| + \| +\|\| \| \|\|\| | |
| Sbjct: | 63 | GLKPGTEYEVRVQAVNGGGNG 83 | |

[0109] TABLE 2T

Domain Analysis of NOV2a

gnl|Pfam|pfam00041, fn3, Fibronectin type III domain (SEQ ID NO:96)
CD-Length = 86 residues, 100.0% aligned
Score = 49.7 bits (117), Expect = 2e−06

| | | | |
|---|---|---|---|
| NOV1: | 1420 | PSVPTNIAFSDVQSTSATLTWIRPDTILGYFQNYKITTQLRAQKCKEWESEECVEYQKIQ | 1479 |
| | | \|\| \|\|\|+ +\|\| \|\|\| \|\|+\| \| \| \|++ \| \|\| \| | |
| Sbjct: | 1 | PSAPTNLTVTDVTSTSLTLSWSPPPDGNGPITGYEVEYQ------PVNSGEEWNEITV-- | 52 |
| NOV1: | 1480 | YLYEAHLTEETVYGLKKFRWYRFQVAASTNAGYGNAS 1516 | |
| | | \| \|+ \|\|\| \| +\| \| \| \| \| | |
| Sbjct: | 53 | ---PGTTTSYTLTGLKPGTEYEVRVQAVNGGGNGPPS 86 | |

[0110] TABLE 2U

Domain Analysis of NOV2a

gnl|Pfam|pfam00041, fn3, Fibronectin type III domain (SEQ ID NO:96)
CD-Length = 86 residues, 98.8% aligned
Score = 47.4 bits (111), Expect = 9e−06

| | | | |
|---|---|---|---|
| NOV 1: | 940 | DPPKDVYYANLSSSSIILFWTPPSKPNGIIQYYSVYYRNT-SGTFMQNFTLHEVTNDFDN | 998 |
| | | \| ++ +++ +\|+ \|\|+\|\| \|\| \| \| \| \|+ \|\| \|+ \| | |
| Sbjct: | 2 | SAPTNLTTDVTSTSLTLSWSPPPDGNGPITGYEVEYQPVNSGEEWNEITVPGTTT---- | 57 |
| NOV 1: | 999 | MTVSTIIDKLTIFSYYTFWLTASTSVGNGNKS 1030 | |
| | | \| + \| + \| + \| \|\|\| \| | |
| Sbjct: | 58 | ---SYTLTGLKPGTEYEVRVQAVNGGGNGPPS 86 | |

[0111] TABLE 2V

Domain Analysis of NOV2a

gnl|Pfam|pfam00041, fn3, Fibronectin type III domain (SEQ ID NO:96)
CD-Length 86 residues, 91.9% aligned
Score = 47.0 bits (110), Expect = 1e−05

| | | | |
|---|---|---|---|
| NOV1: | 1530 | GPPENVHVVATSPFSISISWSEPAVITGP-TCYLIDVKSVDNDEFNISFIKSNEENKTIE | 1588 |
| | | \| \|+ \| + \|+++\|\|\| \| \|\| \| \| ++ + \|++ \| + | |
| Sbjct: | 2 | SAPTNLTVTDVTSTSLTLSWSPPPDGNGPITGYEVEYQPVNSGEEWNEITVPGTTT-SYT | 60 |
| NOV1: | 1589 | IKDLEIFTRYSVVITAFTGN 1608 | |
| | | + \|+ \| \| \| + \| \| | |
| Sbjct: | 61 | LTGLKPGTEYEVRVQAVNGG 80 | |

[0112] TABLE 2W

Domain Analysis of NOV2a

gnl|Pfam|pfam00041, fn3, Fibronectin type III domain (SEQ ID NO:96)
CD-Length = 86 residues, 96.5% aligned
Score = 46.6 bits (109), Expect = 2e−05

| | | | |
|---|---|---|---|
| NOV1: | 1633 | DPPNNMTFQKIPDEVTKFQLTFLPPSQPNGNIQVYQALVYREDDPTAVQIHNLSIIQKTN | 1692 |
| | | \| \|+\| + \| \|++ \|\| \|\| \| \|+ + + + | |
| SbjCt: | 2 | SAPTNLTVTDVTS--TSLTLSWSPPPDGNGPITGYEVEYQPVNSGEEWNEITVPGTTTS- | 58 |
| NOV1: | 1693 | TFVIAMLEGLKGGHTYNISVYAVNSAGAGP 1722 | |
| | | \| \|\|\| \| \| + \| \|\|\| \| \|\| | |
| Sbjct: | 59 | ----YTLTGLKPGTEYEVRVQAVNGGGNGP 84 | |

[0113] TABLE 2X

Domain Analysis of NOV2a

gnl|Pfam|pfam00041, fn3, Fibronectin type III domain (SEQ ID NO:96)
CD-Length = 86 residues, 98.8% aligned
Score = 44.7 bits (104), Expect = 6e−05

| | | | |
|---|---|---|---|
| NOV 1: | 303 | GPPQNCVTGNITGKSFSILWDPPTIVTGKFS-YRVELY---GPSAGRILDNSTKDLKFAF | 358 |
| | | \| \| ++\| \| ++ \| \|\| \| + \| \|\| + + | |
| Sbjct: | 2 | SAPTNLTVTDVTSTSLTLSWSPPPDGNGPITGYEVEYQPVNSGEEWNEITVPGTTTSYTL | 61 |
| NOV 1: | 359 | TNLTPFTMYDVYIAAETSAGTGPKS 383 | |
| | | \| \| \| \| \|+\| + \| \| \|\| \| | |
| Sbjct: | 62 | TGLKPGTEYEVRVQAVNGGGNGPPS 86 | |

[0114] TABLE 2Y

Domain Analysis of NOV2a

gnl|Pfam|pfam0004l, fn3, Fibronectin type III domain (SEQ ID NO:96)
CD−Length 86 residues, 100.0% aligned
Score 43.1 bits (100), Expect=2e−04

| | | | |
|---|---|---|---|
| NOV 1: | 561 | PLSAQNGRVTHVTITEVFLHWDPPDPVF--FHHYLITILDVENQSKSIILRTLNSLSLVL | 618 |
| | | \| + \| \|\| \|\| \| + \| \| \|\| \| + \| + + + + + | |
| Sbjct: | 1 | PSAPTNLTVTDVTSTSLTLSWSPPPDGNGPITGYEVEYQPVNSGEEWNEITVPGTTTSYT | 60 |
| NOV 1: | 619 | I-GLKKYTKYKMRVAASTHVGESSLS 643 | |
| | | + \|\|\| \|+\|++\|\| \| \| \| | |
| Sbjct: | 61 | LTGLKPGTEYEVRVQAVNGGGNGPPS 86 | |

[0115] TABLE 2Z
Domain Analysis of NOV2a

gnl|Pfam|pfam00041, fn3, Fibronectin type III domain (SEQ ID NO:96)
CD−Length=86 residues, 93.0% aligned
Score=38.5 bits (88), Expect=0.004

| | | | |
|---|---|---|---|
| NOV1: | 1047 | VGNLTYESISSTAINVSWVPPAQPNGLVFYY-VSLILQQTPRHVRPPLVT-YERSIYFDN | 1104 |
| | | \|\|\| ++\|\|++ +\|\| \|\| \|\| + \| \| + \| \| | |
| Sbjct: | 4 | PTNLTVTDVTSTSLTLSWSPPPDGNGPITGYEVEYQPVNSGEWNEITVPGTTTSYTLTG | 63 |
| NOV1: | 1105 | LEKYTDYILKITPSTEKGFS 1124 | |
| Sbjct: | 64 | LKPGTEYEVRVQAVNGGGNG 83 | |

[0116] TABLE 2AA

Domain Analysis of NOV2a

gnl|Smart|smart00060, FN3, Eibronectin type 3 domain; One of three
types of internal repeat within the plasma protein, fibronectin. The
tenth fibronectin type III repeat contains a RGD cell recognition
sequence in a flexible loop between 2 strands. Type III modules are
present in both extracellular and intracellular proteins. (SEQ ID NO:97)
CD−Length=83 residues, 96.4% aligned
Score=54.7 bits (130), Expect=6e−08

| | | | |
|---|---|---|---|
| NOV 1: | 54 | PGPPVFLAGERVGSAGILLSWNTPPNP-NGRIISYIVKYKEVCPWMQTVYTQVRSKPDSL | 112 |
| | | \| \|\| \| \| \| + \|\|\| \|\|+ \| \|+ \| \|+\|+\| \| + \| + | |
| Sbjct: | 1 | PSPPSNLRVTDVTSTSVTLSWEPPPDDITGYIVGYRVEYREEGEWKEVNVTP----SSTT | 56 |
| NOV 1: | 113 | EVLLTNLNPGTTYEIKVAAENSAG 136 | |
| | | \|\| \| \|\|\| \|\| +\| \| \| | |
| Sbjct: | 57 | SYTLTGLKPGTEYEFRVRAVNGEA 80 | |

[0117] TABLE 2BB

Domain Analysis of NOV2a

gnl|Smart|smart00060, FN3, Fibronectin type 3 domain; One of three
types of internal repeat within the plasma protein, fibronectin. The
tenth fibronectin type III repeat contains a RGD cell recognition
sequence in a flexible loop between 2 strands. Type III modules are
present in both extracellular and intracellular proteins. (SEQ ID NO:97:)
CD−Length=83 residues, 92.8% aligned
Score=52.8 bits (125), Expect=2e−07

| | | | |
|---|---|---|---|
| NOV 1: | 659 | SSPQDVEVIDVTADEIRLKWSPPEKP-NGIIIAYEVLYKNID---TLYMKNTSTTDIILR | 714 |
| | | \| \| ++ \| \|\|\|+ + \| \| \|\| \| \|+ \| \| \|+ + + +\|\|\|+++\| | |
| Sbjct: | 2 | SPPSNLRVTDVTSTSVTLSWEPPPDDITGYIVGYRVEYREEGEWKEVNVTPSSTTSYTLT | 61 |
| NOV 1: | 715 | NLRPHTLYNISVRSYTR 731 | |
| | | \|+\| \| \| \|\|+ | |
| Sbjct: | 62 | GLKPGTEYEFRVRAVNG 78 | |

[0118] TABLE 2CC
Domain Analysis of NOV2a

gnl|Smart|smart00060, FN3, Fibronectin type 3 domain; One of three
types of internal repeat within the plasma protein, fibronectin. The
tenth fibronectin type III repeat contains a RGD cell recognition
sequence in a flexible loop between 2 strands. Type III modules are
present in both extracellular and intracellular proteins. (SEQ ID NO:97)
CD−Length=83 residues, 94.0% aligned
Score=45.4 bits (106), Expect=3e−05

| | | | |
|---|---|---|---|
| NOV1: | 1235 | PPQNLTLINCTSDFVWLKWSPSPLPGGIVKVYSFKIHEHETDTIYYKNISGFKTEAKLVG | 1294 |
| | | \|\| \|\| + + \|\| \| \| \| \| \| \| + \| + \| \| \| | |
| Sbjct: | 3 | PPSNLRVTDVTSTSVTLSWEPPPDDITGYIVGYRVEYREEGEWKEVNVTPSSTTSYTTG | 62 |
| NOV 1: | 1295 | LEPVSTYSIRVSAFTKVG 1312 | |
| | | \|+\| + \| \|\| \| | |
| Sbjct: | 63 | LKPGTEYEFRVRAVNGEA 80 | |

[0119] TABLE 2DD

Domain Analysis of NOV2a

gnl|Smart|smart00060, FN3, Fibronectin type 3 domain; One of three
types of internal repeat within the plasma protein, fibronectin. The
tenth fibronectin type III repeat contains a RGD cell recognition
sequence in a flexible loop between 2 strands. Type III nodules are
present in both extracellular and intracellular proteins. (SEQ ID NO:97)
CD−Length=83 residues, 100.0% aligned
Score=42.7 bits (99), Expect=2e−04

| | | | |
|---|---|---|---|
| NOV 1: | 561 | PLSAQNFRVTHVTITEVFLHWDPPDPVFFHHYLITILDVENQSKSIILRTLNS--LSLVL | 618 |
| | | \| \| \|\|\| \|\| \| \| \| \|+\|\| + + ++ + + + \| \| \| | |
| Sbjct: | 1 | PSPPSNLRVTDVTSTSVTLSWEPPPDDITGYIVGYRVEYREEGEWKEVNVTPSSTTSYTL | 60 |
| NOV 1: | 619 | IGLKKYTKYKMRVAASTHVGESS 641 | |
| | | \|\|\| \|+\|+ \|\| \| | |
| Sbjct: | 61 | TGLKPGTEYEFRVRAVNGEAGEG 83 | |

[0120] TABLE 2EE
Domain Analysis of NOV2a

gnl|Smart|smart00060, FN3, Fibronectin type 3 domain; One of three
types of internal repeat within the plasma protein, fibronectin. The
tenth fibronectin type III repeat contains a RGD cell recognition
sequence in a flexible loop between 2 strands. Type III modules are
present in both extracellular and intracellular proteins. (SEQ ID NO:97)
CD-Length = 83 residues, 92.8% aligned
Score = 41.2 bits (95), Expect = 7e−04

| | | | |
|---|---|---|---|
| NOV1: | 848 | SPPQDFSVKQLSGVTVKLSWQPPLEP-NGIILYYTVYVWRSS----LKTINVTETSLELS | 902 |
| | | \|\|\| + \| ++ +\| \|\|\|+\|\| + \| \|+ \| \| + + \|\| \|+ | |
| Sbjct: | 2 | SPPSNLRVTDVTSTSVTLSWEPPPDDITGYIVGYRVEYREEGEWKEVNVTPSSTTSYTLT | 61 |
| NOV 1: | 903 | DLDYNVEYSAYVTASTR 919 | |
| | | \| \|\| \| \| | |
| Sbjct: | 62 | GLKPGTEYEFRVRAVNG 78 | |

[0121] Receptor tyrosine phosphatases (rPTPs) are part of the signaling cascades that control cell survival, proliferation and differentiation. The novel protein tyrosine phosphatase described in the application contains a phosphatase domain and thirteen fibronectin type III repeats. It closely resembles rPTP-GMC1, a rat membrane phosphatase that is expressed in kidney glomerulus and is upregulated in response to kidney injury (Wright et.al. J Biol Chem September 1998 11;273(37):23929-37). Tissue specificity of PTPs varies widely; for eg rPTP-GMC1 is expressed by mesangial cells in the kidney while GLEPP1 (another membrane phosphatase) is expressed by podocytes in the kidney ( Thomas et. al. ; J Biol Chem August 1998 5;269(31):19953-62). Tappia et. al. demonstrated expression of a PTP in the liver could regulate the activity of the insulin and EGF receptors (Tappia et. al.; Biochem J May 1993 15;292 (Pt 1): 1-5).A number of phosphatases have been demonstrated to play a role in cancer, for eg. PTP zeta; a membrane phosphatase; is expressed in brain and is also expressed by a glioblastoma cell line (Krueger et. al.; Proc Natl Acad Sci USA August 1992 15;89(16):7417-21); rPTP alpha is expressed in breast tumors and correlates with tumor grade (Ardini et. al.; Oncogene October 2000 12;19(43):4979-87). This phosphatase (rPTP alpha) is also expressed by human prostate cancer cell lines, oral squamous cell carcinoma and was correlated with histological grade of the oral tumor (Zelivianski et. al.; Mol Cell Biochem May 2000 ;208(1-2):11-8; Berndt et al.; Histochem Cell Biol May 1999 ;111(5):399-403). PTP-1B has been suggested to play arole in diabetes and obesity ( Kennedy et. al.; Biochem Pharmacol October 2000 1;60(7):877-83) whle mutations in a PTP named EPM2A have been suggested as the cause of Lafora's disease ( and autosomal recessive form of progressive myoclonus epilepsy) (Minassian et. al. Nat Genet October 1998 ;20(2):171-4). Given the wide ranging effects of this family of proteins, we hypothesize that the novel protein described in this application plays a role in cancer, neurological, immune and metabolic diseases.

[0122] The disclosed NOV2 nucleic acid of the invention encoding a Protein tyrosine phosphatase precursor-like protein includes the nucleic acid whose sequence is provided in Table 2A, 2C, or 2E or a fragment thereof. The invention also includes a mutant or variant nucleic acid any of whose bases may be changed from the corresponding base shown in Table 2A, 2C, or 2E while still encoding a protein that maintains its Protein tyrosine phosphatase precursor like activities and physiological functions, or a fragment of such a nucleic acid. The invention further includes nucleic acids whose sequences are complementary to those just described, including nucleic acid fragments that are complementary to any of the nucleic acids just described. The invention additionally includes nucleic acids or nucleic acid fragments, or complements thereto, whose structures include chemical modifications. Such modifications include, by way of nonlimiting example, modified bases, and nucleic acids whose sugar phosphate backbones are modified or derivatized. These modifications are carried out at least in part to enhance the chemical stability of the modified nucleic acid, such that they may be used, for example, as antisense binding nucleic acids in therapeutic applications in a subject. In the mutant or variant nucleic acids, and their complements, up to about 16 percent of the bases may be so changed.

[0123] The disclosed NOV2 protein of the invention includes the Protein tyrosine phosphatase precursor-like protein whose sequence is provided in Table 2B, 2D, or 2F. The invention also includes a mutant or variant protein any of whose residues may be changed from the corresponding residue shown in Table 2B, 2D, or 2F while still encoding a protein that maintains its Protein tyrosine phosphatase precursor-like activities and physiological functions, or a functional fragment thereof. In the mutant or variant protein, up to about 18 percent of the residues may be so changed.

[0124] The invention further encompasses antibodies and antibody fragments, such as F_{ab} or (F_{ab})₂, that bind immunospecifically to any of the proteins of the invention.

[0125] The above defined information for this invention suggests that this Protein tyrosine phosphatase precursor-like protein (NOV2) may function as a member of a “Protein tyrosine phosphatase precursor family”. Therefore, the NOV2 nucleic acids and proteins identified here may be useful in potential therapeutic applications implicated in (but not limited to) various pathologies and disorders as indicated below. The potential therapeutic applications for this invention include, but are not limited to: protein therapeutic, small molecule drug target, antibody target (therapeutic, diagnostic, drug targeting/cytotoxic antibody), diagnostic and/or prognostic marker, gene therapy (gene delivery/gene ablation), research tools, tissue regeneration in vivo and in vitro of all tissues and cell types composing (but not limited to) those defined here.

[0126] The NOV2 nucleic acids and proteins of the invention are useful in potential therapeutic applications implicated in cancer including but not limited to various pathologies and disorders as indicated below. For example, a cDNA encoding the Protein tyrosine phosphatase precursor-like protein (NOV2) may be useful in gene therapy, and the Protein tyrosine phosphatase precursor-like protein (NOV2) may be useful when administered to a subject in need thereof. By way of nonlimiting example, the compositions of the present invention will have efficacy for treatment of patients suffering from cancer, kidney cancer, trauma, regeneration (in vitro and in vivo), viral/bacterial/parasitic infections, nephrological disesases including diabetes, autoimmune disease, renal artery stenosis, interstitial nephritis, glomerulonephritis, polycystic kidney disease, systemic lupus erythematosus, renal tubular acidosis, IgA nephropathy, hypercalceimia, Lesch-Nyhan syndrome, Hirschsprung's disease, Crohn's Disease, appendicitis, or other pathologies or conditions. The NOV2 nucleic acid encoding the Protein tyrosine phosphatase precursor-like protein of the invention, or fragments thereof, may further be useful in diagnostic applications, wherein the presence or amount of the nucleic acid or the protein are to be assessed.

[0127] NOV2 nucleic acids and polypeptides are further useful in the generation of antibodies that bind immuno-specifically to the novel NOV2 substances for use in therapeutic or diagnostic methods. These antibodies may be generated according to methods known in the art, using prediction from hydrophobicity charts, as described in the “Anti-NOVX Antibodies” section below. The disclosed NOV2 proteins have multiple hydrophilic regions, each of which can be used as an immunogen. In one embodiment, a contemplated NOV2 epitope is from about amino acids 1 to 100. In another embodiment, a NOV2 epitope is from about amino acids 200 to 300. In further embodiments, a NOV2 epitope is from about amino acids 450 to 500, from about amino acids 600 to 900, from about amino acids 950 to 1000, from about amino acids 1200 to 1300, from about amino acids 1400 to 1600, from about amino acids 1800 to 1900, from about amino acids 1950 to 2050, and from about amino acids 2200 to 2300. These novel proteins can be used in assay systems for functional analysis of various human disorders, which will help in understanding of pathology of the disease and development of new drug targets for various disorders.

[0128] NOV3

[0129] A disclosed NOV3 nucleic acid of 4538 nucleotides (also referred to as 134899552_EXT) encoding a novel human homolog of the Drosophila pecanex-like protein is shown in Table 3A. An open reading frame was identified beginning with an ATG initiation codon at nucleotides 101-103 and ending with a TGA codon at nucleotides 4439-4441. A putative untranslated region upstream from the initiation codon and downstream from the termination codon is underlined in Table 3A, and the start and stop codons are in bold letters.

TABLE 3A
NOV3 nucleotide sequence.

(SEQ ID NO:11)

CATGAAGGAAAAATTCTGAGTATTCTAATGGCTTTTTAAAATAATCATTTATTTGCTAGGTAAGTTCTCTTC
TACGCTGTATGAGACTGGTGGCTGTGATATGTCACTTGTGAATTTTGAACCAGCAGCAAGAAGAGCATCCAA
TATCTGGGACACAGATTCTCATGTATCCAGTTCTACCTCAGTTCGATTTTATCCACATGATGTGATTCGATT
GAATAGACTATTGACCATTGATACAGATTTGTTGGAGCAACAGGACATTGATCTAAGCCCTGACTTGGCAGC
TACTTACGGCCCAACAGAAGAAGCTGCCCAAAAGGTTAAACACTATTATCGCTTTTGGATCCTACCCCAGCT
GTGGATTGGCATTAACTTTGACAGACTCACACTTTGGCCCTGTTTGATAGGAATCGTGAGATCCTGGAAAA
TGTGTTAGCTGTCATCCTGGCTATTCTCGTGGCCTTTTTGGGATCTATTCTTCTCATACAAGGATTCTTCAG
AGATATCTGGGTCTTCCAGTTCTGCCTCGTCATAGCCAGCTGTCAATACTCACTGCTTAAGAGTGTTCAACC
AGATTCTTCTTCTCCCAGACATGGTCATAATCGTATCATTGCCTACAGTAGACCAGTTTATTTCTGCATATG
TTGCGGTCTTATTTGGCTCTTGGATTATGGTAGCAGAAACCTGACTGCAACCAAGTTCAAATTATATGGAAT
AACTTTCACCAATCCACTGGTGTTTATATCAGCCAGGGATTTAGTTATAGTGTTTACACTCTGTTTCCCAAT
AGTGTTTTTCATTGGTCTCCTGCCTCAGGTGAATACATTTGTAATGTACCTTTGTGAACAATTGGATATTCA
TATTTTTGGTGGTAATGCCACTACAAGCCTGCTTGCAGCACTTTACAGTTTTATCTGTAGCATTGTTGCAGT
AGCCTTATTGTATGGATTATGTTATGGGGCTTTACAGGATTCTTGGGATGGCCAGCATATTCCAGTACTTTT
CTCCATTTTTTGTGGTTTATTAGTGGCAGTGTCTTACCATCTCAGCCGACAAAGCAGTGATCCATCTGTACT
TAGCTCTTTAGTGCAATCCAAGATTTTTCCAAAAACGGAAGAGAAAAATCCAGAAGACCCTCTATCTGAAGT
AAAAGATCCACTGCCTGAAAAACTTAGAAATTCTGTTAGTGAGCGATTACAGTCTGACCTGGTAGTATGCAT
TGTAATTGGTGTGCTGTATTTTGCTATTCATGTAAGCACAGTCTTCACAGTATTGCAGCCTGCCCTCAAGTA
TGTGTTGTATACATTGGTTGGCTTTGTGGGTTTTGTAACCCATTATGTGCTGCCTCAAGTTAGAAAACAGCT
ACCATGGCACTGTTTCTCTCATCCTCTGCTAAAGACACTAGAGTATAATCAGTATGAAGTTCGAGATGCAGC
CACTATGATGTGGTTTGAGAAACTTCATGTGTGGCTTCTTTTTGTGGAGAAGAATATAATCTATCCATTGAT
TGTTCTCAATGAACTGAGCAGCAGTGCAGAGACAATTGCTAGTCCAAAGAAACTGAATACAGAGTTAGGTGC
TTTAATGATCACTGTTGCTGGTTTGAAGTTGCTACGATCCTCTTTTAGCAGCCCTACATATCAGTATGTTAC
AGTCATCTTTACTGTGCTGTTTTTCAAATTTGACTATGAAGCTTTTTCAGAGACCATGCTGTTGGATCTCTT
CTTTATGTCCATACTCTTCAACAAGCTTTGGGAACTACTTTATAAATTGCAGTTTGTGTATACCTATATTGC
CCCATGGCAGATCACATGGGGTTCTGCTTTCCATGCTTTTGCTCAGCCTTTTGCAGTGCCTCGTTCAGCCAT
GCTGTTTATTCAGGCTGCTGTCTCGGCCTTCTTCTCTACTCCACTGAACCCCTTTCTGGGAAGTGCAATATT
CATCACTTCATATGTCCGACCTGTGAAATTCTGGGAGAGAGACTATAGCACAAAACGAGTGGATCATTCAAA
TACCAGATTGGCTTCCCAGCTTGATAGAAATCCAGGTTCAGATGACAACAATCTGAATTCCATCTTTTATGA
GCATTTAACTAGATCCCTACAGCACAGCCTCTGTGGTGATTTGCTACTAGGACGGTGGGGAAACTACAGTAC
AGGGGACTGTTTCATCCTTGCCTCTGACTATCTCAATGCATTAGTACACCTTATAGAGATAGGCAATGGTCT
GGTCACTTTTCAGCTGCGGGGACTTGAATTCAGAGGTACCTACTGTCAACAACGGGAAGTGGAGGCCATTAC
TGAAGGTGTAGAGGAAGATGAAGGATTTTGCTGTTGTGAACCTGGCCATATTCCTCACATGCTTTCATTTAA
TGCTGCATTTAGCCAGCGATGGCTAGCTTGGGAAGTGATAGTCACAAAGTACATTCTGGAGGGTTATAGCAT
CACTGATAACAGTGCTGCTTCTATGCTTCAAGTCTTTGATCTTCGGAAAGTACTCACCACTTACTATGTCAA
GGGTATCATTTATTATGTTACGACCTCGTCTAAGCTAGAGGAGTGGCTAGCTAATGAGACAATGCAGGAAGG
ACTTCGTCTGTGTGCTGATCGCAATTATGTCGATGTGGACCCGACCTTTAATCCAAACATTGATGAAGACTA
TGACCACCGACTGGCAGGCATATCTAGGGAGAGTTTCTGTGTGATTTACCTCAACTGGATAGAGTACTGCTC
TTCCCGAAGAGCAAAGCCTGTGGATGTGGACAAAGATTCATCCCTAGTGACTCTCTGTTATGGACTCTGTGT
TCTGGGACGGAGAGCTTTGGGGACTGCATCCCATCATATGTCCAGTAATTTAGAGTCATTCCTCTATGGATT
GCATGCCCTATTTAAAGGAGATTTCCGTATTTCTTCAATTCGAGATGAATGGATCTTTGCTGACATGGAATT
GCTAAGAAAAGTAGTAGTCCCTGGGATCCGTATGTCCATTAAACTTCATCAGGATCATTTTACTTCTCCAGA
TGAATATGATGACCCTACTGTGCTCTATGAAGCCATAGTATCTCATGAGAAGAACCTCGTAATAGCCCATGA
AGGGGACCCTGCATGGCGGAGTGCAGTACTTGCCAACTCTCCCTCCTTGCTTGCTCTGCGGCATGTCATGGA
TGATGGCACCAATGAATATAAAATCATCATGCTCAACAGACGCTACCTGAGCTTCAGGGTCATTAAAGTGAA
TAAGGAATGTGTCCGAGGTCTTTGGGCAGGGCAACAGCAGGAGCTTGTTTTTCTACGTAACCGTAACCCAGA
TAGAGGTAGCATCCAAAATGCAAAGCAAGCCCTGAGAAACATGATAAACTCATCTTGTGATCAACCTATTGG
CTACCCAATCTTTGTCTCACCCCTGACAACTTCTTACTCTGACAGCCACGAACAGCTTAAAGACATTCTTGG
GGGTCCTATCAGCTTGGGAAATATCAGGAACTTCATAGTGTCAACCTGGCACAGGCTTAGGAAAGGTTGCGG
AGCTGGATGTAACAGTGGTGGCAATATTGAAGATTCTGATACTGGAGGTGGGACTTCCTGCACTGGTAACAA
TGCAACAACTGCCAACAATCCCCACAGCAACGTGACCCAGGGAAGCATTGGAAATCCTGGGCAGGGATCAGG
AACTGGACTCCACCCACCTGTCACATCTTATCCTCCAACACTAGGTACTAGCCACAGCTCTCACTCTGTGCA
GTCGGGCCTGGTCAGACAGTCTCCTGCCCGGGCCTCAGTAGCCAGCCAGTCTTCCTACTGCTATAGCAGCCG
GCATTCATCCCTCCGGATGTCCACCACTGGGTTTGTGCCTTGTCGGCGCTCTTCTACTAGTCAGATATCGCT
TCGAAACTTGCCATCATCCATCCAATCCCGACTGTCGATGGTGAACCAAATGGAACCCTCAGGTCAGAGCGG
CCTGGCCTGTGTGCAGCACGGCCTGCCTTCCTCCAGCAGCTCCAGCCAAAGCATCCCAGCCTGCAAACATCA
CACTCTCGTGGGCTTTCTTGCGACAGACCCAGGTCAGAGCAGTGCCACTGATGCACAGCCAGGCAACACCTT
AAGTCCTGCCAACAATTCACACTCCAGAAAGGCAGAAGTGATTTACAGAGTCCAAATTGTGGATCCCAGTCA
AATTCTGGAAGGGATCAACCTGTCTAAAAGGAAAGAGCTACAGTGGCCTGATGAAGGAATCCGGTTAAAAGC
TGGGAGAAATAGCTGGAAAGACTGGAGTCCGCAGGAGGGCATGGAAGGCCATGTGATTCACCGATGGGTGCC
TTGCAGCAGAGATCCAGGTACCAGATCCCACATCGACAAGGCAGTGCTTCTGGTCCAGATTGATGATAAATA
TGTGACTGTAATTGAAACTGGGGTACTAGAACTTGGGGCTGAAGTGTGAGCCAGTGTTTATTATAAAGACAT
TTCTTTTTCCCTCTCAATTCCAAGGCATTGGAAAAAGAGAGGAACAAGCAGAAGATGCCTGCAGGTATCACT
TT

[0130] The disclosed NOV3 nucleic acid sequence, localized to chromsome 14, has 2277 of 2283 bases (99%) identical to a gb:GENBANK-ID:AB018348|acc:AB018348.1 mRNA from Homo sapiens (Homo sapiens mRNA for KIAA0805 protein, partial cds) (E=0.0).

[0131] A NOV3 polypeptide (SEQ ID NO: 12) encoded by SEQ ID NO: 11 has 1446 amino acid residues and is presented using the one-letter code in Table 3B. Signal P, Psort and/or Hydropathy results predict that NOV3 does not contain a signal peptide and is likely to be localized to the plasma membrane with a certainty of 0.8000. In other embodiments, NOV3 may also be localized to the mitochondrial inner membrane with a certainty of 0.4714, the Golgi body with a certainty of 0.4000, or the endoplasmic reticulum (membrane) with a certainty of 0.3000.

TABLE 3B
Encoded NOV3 protein sequence.

(SEQ ID NO:12)

MSLVNFEPAARRASNIWDTDSHVSSSTSVRFYPHDVIRLNRLLTIDTDLLEQQDIDLSPDLAATYGPTEEAA
QKVKHYYRFWILPQLWIGINFDRLTLLALFDRNREILENVLAVILAILVAFLGSILLIQGFFRDIWVFQFCL
VIASCQYSLLKSVQPDSSSPRHGHNRIIAYSRPVYFCICCGLIWLLDYGSRNLTATKFKLYGITFTNPLVFI
SARDLVIVFTLCFPIVFFIGLLPQVNTFVMYLCEQLDIHIFGGNATTSLLAALYSFICSIVAVALLYGLCYG
ALQDSWDGQHIPVLFSIFCGLLVAVSYHLSRQSSDPSVLSSLVQSKIFPKTEEKNPEDPLSEVKDPLPEKLR
NSVSERLQSDLVVCIVIGVLYFAIHVSTVFTVLQPALKYVLYTLVGFVGFVTHYVLPQVRKQLPWHCFSHPL
LKTLEYNQYEVRDAATMMWFEKLHVWLLFVEKNIITPLIVLNELSSSAETIASPKKLNTELGALMITVAGLK
LLRSSFSSPTYQYVTVIFTVLFFKFDYEAFSETMLLDLFFMSILFNKLWELLYKLQFVYTYIAPWQITWGSA
FHAFAQFPAVPRSAMLFIQAAVSAFFSTPLNPFLGSAIFITSYVRPVKFWERDYSTKRVDHSNTRLASQLDR
NPGSDDNNLNSIFYEHLTRSLQHSLCGDLLLGRWGNYSTGDCFILASDYLNALVHLIEIGNGLVTFQLRGLE
FRGTYCQQREVEAITEGVEEDEGFCCCEPGHIPHMLSFNAAFSQRWLAWEVIVTKYILEGYSITDNSAASML
QVFDLRKVLTTYYVKGIIYYVTTSSKLEEWLANETMQEGLRLCADRNYVDVDPTFNPNIDEDYDHRLAGISR
ESFCVIYLNWIEYCSSRRAKPVDVDKDSSLVTLCYGLCVLGRRALGTASHHMSSNLESFLYGLHALFKGDFR
ISSIEDEWIFADMELLRKVVVPGIRMSIKLHQDHFTSPDEYDDPTVLYEAIVSHEKNLVIAHEGDPAWRSAV
LANSPSLLALRHVMDDGTNEYKIIMLNRRYLSFRVIKVNKECVRGLWAGQQQELVFLRNRNPERGSIQNAKQ
ALRNMINSSCDQPIGYPIFVSPLTTSYSDSHEQLKDILGGPISLGNIRNFIVSTWHRLRKGCGAGCNSGGNI
EDSDTGGGTSCTGNNATTANNPHSNVTQGSIGNPGQGSGTGLHPPVTSYPPTLGTSHSSHSVQSGLVRQSPA
RASVASQSSYCYSSRHSSLRMSTTGFVPCRRSSTSQISLRNLPSSIQSRLSMVNQMEPSGQSGLACVQHGLP
SSSSSSQSIPACKHHTLVGFLATEGGQSSATDAQPGNTLSPANNSHSRKAEVIYRVQIVDPSQILEGINLSK
RRELQWPDEGIRLKAGRNSWKDWSPQEGMEGHVIHRWVPCSRDPGTRSHIDKAVLLVQIDDKYVTVIETGVL
ELGAEV

[0132] The disclosed NOV3 amino acid sequence has 1355 of 1446 amino acid residues (93%) identical to, and 1409 of 1446 amino acid residues (97%) similar to, the 1446 amino acid residue ptnr:SPTREMBL-ACC:Q9QYC1 protein from Mus musculus (Mouse) (PECANEX 1) (E=0.0).

[0133] NOV3 is expressed in at least Pancreas, Parathyroid Gland, Thyroid, Mammary gland/Breast, Ovary, Placenta, Uterus, Colon, Liver, Bone Marrow, Lymphoid tissue, Spleen, Tonsils, Prostate, Testis, Brain, Lung, and Kidney. This information was derived by determining the tissue sources of the sequences that were included in the invention including but not limited to SeqCalling sources, Public EST sources, Literature sources, and/or RACE sources.

[0134] In addition, NOV3 is predicted to be expressed in Homo sapiens heart, melanocyte, B-cells, larynx, skin, CNS, and multiple sclerosis lesions because of the expression pattern of the following sequences (which are publicly availabel ESTS for the sequence of the invention) AB018348, BE881203, BE867469, BE867415, AB007895, NM_{—}014801, U74315, BE880986, W500099, AW250617, AA426168, AW246742, AA284182, W46420, H14491, Z44921, BE930588, AI922381, AI215559, AA923742, AA582883, BE797814, N75143, BE049421, F07632, BE797239, AI168579, AV653955, BE065657, AL079849, and BE767656, closely related Homo sapiens mRNA for KIAA proteins, partial cds homolog.

[0135] NOV3 also has homology to the amino acid sequences shown in the BLASTP data listed in Table 3C.

TABLE 3C
BLAST results for NOV3

| Gene Index/ | Protein/ | Length | Identity | Positives | |
|---|---|---|---|---|---|
| Identifier | Organism | (aa) | (%) | (%) | Expect |
| ref\|XP_027243.1\| | hypothetical | 619 | 619/619 | 619/619 | 0.0 |
| (XM_027243) | protein | | (100%) | (100%) | |
| | XP_027243 | | | | |
| | [Homo | | | | |
| | sapiens] | | | | |
| gi\|15076843\|gb\|AAK82958.1\| | pecanex-like | 2341 | 1372/1451 | 1376/1451 | 0.0 |
| AF233450_1 | protein 1 | | (94%) | (94%) | |
| (AF233450) | [Homo | | | | |
| | sapiens] | | | | |
| gi\|6650377\|gb\|AAF21809.1\| | pecanex 1 | 1446 | 1296/1446 | 1344/1446 | 0.0 |
| AF096286_1 | [Mus | | (89%) | (92%) | |
| (AF096286) | musculus] | | | | |
| gi\|13171105\|gb\|AAK13590.1\| | pecanex | 1703 | 1079/1466 | 1204/1466 | 0.0 |
| AF154413_1 | [Takifugu | | (73%) | (81%) | |
| (AF154413) | rubripes] | | | | |
| gi\|7290294\|gb\|AAF45755.1\| | pcx gene | 3437 | 320/554 | 424/554 | 0.0 |
| (AE003423) | product [alt | | (57%) | (75%) | |
| | 1] | | | | |
| | [Drosophila | | | | |
| | melanogaster] | | | | |

[0136] The homology of these sequences is shown graphically in the ClustalW analysis shown in Table 3D.

[image]

[image]

[image]

[image]

[image]

[image]

[0137] Pecanex gene was originally discovered in Drosophila, encoding a large, membrane-spanning protein. The mouse homolog was recently reported. In the absence of maternal expression of the pecanex gene, the embryo develops severe hyperneuralization similar to that characteristic of Notch mutant embryos. Early gastrula embryos, lacking both maternally and zygotically expressed activity of the neurogenic pecanex locus, are shown to contain a greater than wild-type number of stably determined neural precursor cells which can differentiate into neurons in culture. Therefore it is anticipated that this novel human pecanex will be involved in neuronal differentiation, maintenance of neuronal precursors and neurological diseases.

[0138] The disclosed NOV3 nucleic acid of the invention encoding a Human homolog of the Drosophila pecanex protein includes the nucleic acid whose sequence is provided in Table 3A or a fragment thereof. The invention also includes a mutant or variant nucleic acid any of whose bases may be changed from the corresponding base shown in Table 3A while still encoding a protein that maintains its Human homolog of the Drosophila pecanex activities and physiological functions, or a fragment of such a nucleic acid. The invention further includes nucleic acids whose sequences are complementary to those just described, including nucleic acid fragments that are complementary to any of the nucleic acids just described. The invention additionally includes nucleic acids or nucleic acid fragments, or complements thereto, whose structures include chemical modifications. Such modifications include, by way of nonlimiting example, modified bases, and nucleic acids whose sugar phosphate backbones are modified or derivatized. These modifications are carried out at least in part to enhance the chemical stability of the modified nucleic acid, such that they may be used, for example, as antisense binding nucleic acids in therapeutic applications in a subject. In the mutant or variant nucleic acids, and their complements, up to about 1 percent of the bases may be so changed.

[0139] The disclosed NOV3 protein of the invention includes the Human homolog of the Drosophila pecanex protein whose sequence is provided in Table 3B. The invention also includes a mutant or variant protein any of whose residues may be changed from the corresponding residue shown in Table 3B while still encoding a protein that maintains its Human homolog of the Drosophila pecanex activities and physiological functions, or a functional fragment thereof. In the mutant or variant protein, up to about 7 percent of the residues may be so changed.

[0140] The NOV3 nucleic acids and proteins of the invention are useful in potential therapeutic applications implicated in cancer,trauma, regeneration (in vitro and in vivo), viral/bacterial/parasitic infections, cardiomyopathy, atherosclerosis, hypertension, congenital heart defects, aortic stenosis, atrial septal defect (ASD), atrioventricular (A-V) canal defect, ductus arteriosus, pulmonary stenosis, subaortic stenosis, ventricular septal defect (VSD), valve diseases, tuberous sclerosis, multiple sclerosis, scleroderma, obesity, endometriosis, fertility, hypercoagulation, autoimmume disease, allergies, immunodeficiencies, transplantation, hemophilia, idiopathic thrombocytopenic purpura, graft versus host disease, Von Hippel-Lindau (VHL) syndrome, Alzheimer's disease, stroke, hypercalceimia, Parkinson's disease, Huntington's disease, cerebral palsy, epilepsy, ataxia-telangiectasia, leukodystrophies, behavioral disorders, addiction, anxiety, pain, neuroprotection, systemic lupus erythematosus, asthma, emphysema, ARDS, laryngitis, psoriasis, actinic keratosis, acne, hair growth/loss, allopecia, pigmentation disorders, endocrine disorders, diabetes, renal artery stenosis, interstitial nephritis, glomerulonephritis, polycystic kidney disease, systemic lupus erythematosus, renal tubular acidosis, IgA nephropathy, Lesch-Nyhan syndrome, and a variety of kidney diseases and/or other pathologies and disorders.

[0141] NOV3 nucleic acids and polypeptides are further useful in the generation of antibodies that bind immunospecifically to the novel substances of the invention for use in therapeutic or diagnostic methods. These antibodies may be generated according to methods known in the art, using prediction from hydrophobicity charts, as described in the “Anti-NOVX Antibodies” section below. The disclosed NOV3 protein has multiple hydrophilic regions, each of which can be used as an immunogen. In one embodiment, a contemplated NOV3 epitope is from about amino acids 20 to 50. In another embodiment, a NOV3 epitope is from about amino acids 180 to 200. In additional embodiments, NOV3 epitopes are from about amino acids 360 to 400, from about 450 to 500, from about amino acids 600 to 680, from about amino acids 720 to 780, from about amino acids 800 to 860, from about amino acids 950 to 1000, from about amino acids 1050 to 1100, from about amino acids 1150 to 1320, and from about amino acids 1350 to 1420. These novel proteins can be used in assay systems for functional analysis of various human disorders, which are useful in understanding of pathology of the disease and development of new drug targets for various disorders.

[0142] NOV4

[0143] A disclosed NOV4 nucleic acid of 1500 nucleotides (also referred to as SC140515441_A) encoding a novel Aurora-related kinase I-like protein is shown in Table 4A. An open reading frame was identified beginning with a ATG initiation codon at nucleotides 182-184 and ending with a TAG codon at nucleotides 1391-1393. The start and stop codons are in bold letters, and the 5′ and 3′ untranslated regions are underlined.

TABLE 4A
NOV4 Nucleotide Sequence

(SEQ ID NO:13)

TCATCTTAAATTTTTTTAGCTGATATAGTTGTAATTTCTTAACCTAGCTCATCTCTAGAGGATATGTAAAA
ACATAAAACACCTCAATTACTTGTGAATTATAGAGGTGTATCAGTTGGTTTAAAAGTGCTTTTATTGGGCT
GAGCTCTTGGAAGACTCAGGTCCTTGGGTCATAGGCATCATGGACCAATCTGAAGAAAACTGCATTTCAGG
GCCCTGTTGAGGCTAAAACTCCAGTTGGAGGTCCAGAACATGTTCTCGTGACTCAGCAATTTCCTTGTCAGA
ATCCATTACCTGCAAATAGTGGCCAGGCTCAGTGGGTCTTGTGTCCTTCAAATTCTTCGCAGCGTGTTCCT
TTGCAAGCACAAAAGCTTGTCTCCAGTCACAAGCCAGTTCAGAATCAGAAGCAGAAGCAATTGCAGGCAAC
CAGTGTACCTCATCCTGCCTCCAGGCCACTGAATAACACCCAAAACAGCAAGCAGTCCCCGCTGTCGGCAC
CTGAAAATAATCCTGAGGAGGAACTGGCATCAAAACAGAAAAATGAAGAATCAAAAAAGAGGCAATGGGCT
TTGGAAGACCTTGAAATTGGTCGCCCTCCGGGTAAAGGAAAGTTTGGTAATGTTTATTTGGCAAGAGAAAA
ACAAAGCAAGTTTATTCTGGCTCTTAGGGTGTTATTTAAAGCTCAGCTGGAGAAAGCAGGAGTGGAGCATC
AACTCAGAAGAGAAGTAGAAATACAGTCCCACCTCCAACATCCTAATATAATCAGACTGTATGGTTATTTC
CATGATGCCACCAGAGTCTACCTAATTCTGGAATATACACCACTTGAAACAGTCAATACAGAACTTCAGAA
ACTTTCAAAGTTTGATGAGCAGAGAACTGCTACTTATATCACAGAATTGGCAAGTGCCCTGTCTTACTGTC
ATTCAAAAACAGTTATTCATAGAGACATTAAGCCAGAGAACTTACTTCTTGGATCAGCTGGAGAGCTTGAA
ATTGCAAATTTTGGGTGGTCAGAACATGCTCCATCTTCCAGGAGGACCACTCTCTGTGGCACCCTGGACTA
CCTGCCCCCCGAAATGATTGAAGGTCGGATGCATGATGAGAAGGTGGATCTCTGGAGCCTTGGAGTTCTTT
GCTGTGAATTTTTAGTTGGGAAGCCTCCTTTTGAGGCAAATACATACCAAGAGACCTACAAAAGAATATCA
CGGGTTGAGTTCACATTCCCTGACTTTGTAACAGAGGGAGCCAGGGACCTCATTTCAAGACTGTTGAAGCA
TGTTCCCAGCCAGAGGCCAATGCTCAGAGAAGTACTTGAATACCCCTGGATCACAGCAAATTCATCAAAAC
CATCAAATTGCCAAAACAAAGAATCAACTAGCAAGTATTCTTAGGAATCGTGCAGGGGGAGAAATCCTTGA
GCCAGGGCTGCTGTATAACCTCTCAGGAACATGCTACCAAAATTTATTTTACCATTGACTGCTGCCCTCAA
TCTAGAACA

[0144] The disclosed NOV4 nucleic acid sequence maps to chromosome 1 and has 1152 of 1212 bases (95%) identical to a gb:GENBANK-ID:AF008551|acc:AF008551 mRNA from Homo sapiens (Homo sapiens aurora-related kinase 1 (ARK1) mRNA, complete cds (E=1.8e⁻²⁴³).

[0145] A disclosed NOV4 protein (SEQ ID NO: 14) encoded by SEQ ID NO: 13 has 403 amino acid residues, and is presented using the one-letter code in Table 4B. Signal P, Psort and/or Hydropathy results predict that NOV4 does not have a signal peptide, and is likely to be localized to the cytoplasm with a certainty of 0.4500. In other embodiments NOV4 is also likely to be localized microbody (peroxisome) with a certainty of 0.3000, to the mitochondrial membrane space with a certainty of 0.1000, or to the lysosome(lumen) with a certainty of 0.1000.

TABLE 4B
Encoded NOV4 protein sequence.

(SEQ ID NO:14)

MDQSEENCISGPVEAKTPVGGPEHVLVTQQFPCQNPLPANSGQAQWVLCP
SNSSQRVPLQAQKLVSSHKPVQNQKQKQLQATSVPHPASRPLNNTQNSKQ
SPLSAPENNPEEELASKQKNEESKKRQWALEDLEIGRPPGKGKFGNVYLA
REKQSKFILALRVLFKAQLEKAGVEHQLRREVEIQSHLQHPNIIRLYGYF
HDATRVYLILEYTPLETVNTELQKLSKFDEQRTATYITELASALSYCHSK
TVIHRDIKPENLLLGSAGELEIANFGWSEHAPSSRRTTLCGTLDYLPPEM
IEGRMHDEKVDLWSLGVLCCEFLVGKPPFEANTYQETYKRISRVEFTFPD
FVTEGARDLISRLLKHVPSQRPMLREVLEYPWITANSSKPSNCQNKESTS
KYS

[0146] The disclosed NOV4 amino acid has 69 of 403 amino acid residues (91%) identical to, and 381 of 403 amino acid residues (94%) similar to, the 403 amino acid residue ptnr:SPTREMBL-ACC:060445 protein from Homo sapiens (Human) (Aurora-Related Kinase 1 (E=1.7e⁻¹⁹⁸).

[0147] NOV4 is expressed in at least Adrenal Gland/Suprarenal gland, Amygdala, Bone Marrow, Brain, Cervix, Colon, Coronary Artery, Epidermis, Heart, Kidney, Liver, Lung, Lymphoid tissue, Mammary gland/Breast, Ovary, Peripheral Blood, Placenta, Prostate, Testis, Thalamus, Tonsils, Uterus. This information was derived by determining the tissue sources of the sequences that were included in the invention.

[0148] In addition, NOV4 is predicted to be expressed in colon because of the expression pattern of (GENBANK-ID: gb:GENBANK-ID:AF008551|acc:AF008551) a closely related aurora-related kinase 1 (ARK1) mRNA, complete cds homolog in species Homo sapiens.

[0149] NOV4 also has homology to the amino acid sequences shown in the BLASTP data listed in Table 4C.

TABLE 4C
BLAST results for NOV4

| Gene Index/ | Protein/ | Length | Identity | Positives | |
|---|---|---|---|---|---|
| Identifier | Organism | (aa) | (%) | (%) | Expect |
| gi\|12654873\|gb\|AAH01280.1\| | serine/threonine | 403 | 370/403 | 381/403 | 0.0 |
| AAH01280 | kinase | | (91%) | (93%) | |
| (BC001280) | 15 [Homo | | | | |
| | sapiens] | | | | |
| gi\|13653970\|ref\|XP_{—} | serine/threonine | 403 | 369/403 | 381/403 | 0.0 |
| 009546.3\| | kinase | | (91%) | (93%) | |
| (XM_009546) | 15 [Homo | | | | |
| | sapiens] | | | | |
| gi\|4507275\|ref\|NP_003591.1\| | serine/threonine | 403 | 369/403 | 380/403 | 0.0 |
| (NM_003600) | kinase | | (91%) | (93%) | |
| | 15; | | | | |
| | Serine/threonine | | | | |
| | protein | | | | |
| | kinase 15 | | | | |
| | [Homo | | | | |
| | sapiens] | | | | |
| gi\|7446411\|pir\|\|JC5974 | aurora- | 403 | 367/403 | 379/403 | 0.0 |
| | related | | (91%) | (93%) | |
| | kinase 1 (EC | | | | |
| | 2.7.-.-) - | | | | |
| | human | | | | |
| gi\|4507279\|ref\|NP_003149.1\| | serine/threonine | 402 | 342/403 | 360/403 | 0.0 |
| (NM_003158) | kinase 6; | | (84%) | (88%) | |
| | Serine/threonine | | | | |
| | protein | | | | |
| | kinase-6; | | | | |
| | serine/threonine | | | | |
| | kinase 6 | | | | |
| | (aurora/IPL1- | | | | |
| | like) [Homo | | | | |
| | sapiens] | | | | |

[0150] The homology of these sequences is shown graphically in the ClustalW analysis shown in Table 4D.

[image]

[image]

[0151] Tables 4E-G lists the domain description from DOMAIN analysis results against NOV4. This indicates that the NOV4 sequence has properties similar to those of other proteins known to contain this domain.

TABLE 4E
Domain Analysis of NOV4

gnl|Smart|smart00220, S_TKc, Serine/Threonine protein kinases,
catalytic domain; Phosphotransterases. Serine or threonine-specific
kinase subfamily. (SEQ ID NO:98)
CD-Length = 256 residues, 99.6% aligned
Score = 256 bits (653), Expect = 2e−69

| | | | |
|---|---|---|---|
| NOV 3: | 134 | EIGRPPGKGKFGNVYLAREKQSKFILALRVLFKAQLEKAGVEHQLRREVEIQSHLQHPNI | 193 |
| | | \|+ \|\|\| \|\| \|\|\|\|\|+\|++ ++\|++\|+ \| +\|+\| ++ \|\|++\| \| \|\|\|\| | |
| Sbjct: | 2 | ELLEVLGKGAFGKVYLARDKKTGKLVAIKVIKKEKLKK-KKRERILREIKILKKLDHPNI | 60 |
| NOV 3: | 194 | IRLYGYFHDATRVYLILEYTPLETVNTELQKLSKFDEQRTATYITELASALSYCHSKTVI | 253 |
| | | ++\|\| \| \| ++\|\|++\|\| + \|+\| + \| \| ++ \|\|\| \| \|\|+ +\| | |
| Sbjct: | 61 | VKLYDVFEDDDKLYLVMEYCEGGDLFDLLKKRGRLSEDEARFYARQILSALEYLHSQGII | 120 |
| NOV 3: | 254 | HRDIKPENLLLGSAGELEIANFGWS--EHAPSSRRTTLCGTLDYLPPEMIEGRMHDEKVD | 311 |
| | | \|\|\|+\|\|\|\|+\|\| \| \| +++\|+\|\| + + + \|\| \|\| +\|+ \|\|++ \|+ + + \|\| | |
| Sbjct: | 121 | HRDLKPENILLDSDGHVKLADFGLAKQLDSGGTLLTTFVGTPEYMAPEVLLGKGYGKAVD | 180 |
| NOV 3: | 312 | LWSLGVLCCEFLVGKPPFEA-NTYQETYKRISRVEFTFPDF---VTEGARDLISRLLKHV | 367 |
| | | +\|\|\|\|\|+ \| \| \|\|\|\|\| + +\|+\| + \|\| ++ \|+\|\|\| +\|\| | |
| Sbjct: | 181 | IWSLGVILYELLTGKPPFPGDDQLLALFKKIGKPPPPFPPPEWKISPEAKDLIKKLLVKD | 240 |
| NOV 3: | 368 | PSQRPMLREVLEYPWT 383 | |
| | | \| +\| \| \|\|+\|+ | |
| Sbjct: | 241 | PEKRLTAEEALEHPFF 256 | |

[0152] TABLE 4F
Domain Analysis of NOV4

gnl|Pfam|pfam00069, pkinase, Protein kinase domain (SEQ ID NO:99)
CD-Length = 256 residues, 100.0% aligned
Score = 221 bits (564), Expect = 5e−59

| | | | |
|---|---|---|---|
| NOV 3: | 133 | LEIGRPPGKGKFGNVYLAREKQSKFILALRVLFKAQLEKAGVEHQLRREVEIQSHLQHPN | 192 |
| | | \|+\| \| \| \|\| \|\| + \| + \|+\|+++\| \| \| + + + \|\|++\| \| \|\|\| | |
| Sbjct: | 1 | YELGEKLGSGAFGKVYKGKHKDTGEIVAIKILKKRSLSE--KKKRFLREIQILRRLSHPN | 58 |
| NOV 3: | 193 | IIRLYGYFHDATRVYLILEYTPLETVNTEL-QKLSKFDEQRTATYITELASALSYCHSKT | 251 |
| | | \|+\|\| \| \| + +\|\|++\|\| + \| + \|+ ++ \| \| \|\|+ | |
| Sbjct: | 59 | IVRLLGVFEEDDHLYLVMEYMEGGDLFDYLRRNGLLLSEKEAKKIALQILRGLEYLHSRG | 118 |
| NOV 3: | 252 | VIHRDIKPENLLLGSAGELEIANFGWS---EHAPSSRRTTTLCGTLDYLPPEMIEGRMHDE | 308 |
| | | ++\|\|\|+\|\|\|\|+\|\| \| ++\|\|+\|\| + \| + + \|\| \|\| +\|+ \|\|++\|\|\| + | |
| Sbjct: | 119 | IVHRDLKPENILLDENGTVKIADFGLARKLESSSYEKLTTFVGTPEYMAPEVLEGRGYSS | 178 |
| NOV 3: | 309 | KVDLWSLGVLCCEFLVGKPPFEANTYQETYKRI---SRVEFTFPDFVTEGARDLISRLLK | 365 |
| | | \|\|\|+\|\|\|\|\|+ \| \| \|\| \|\| \| \|\| \|+ \| +\| +\|\|\| + \| | |
| Sbjct: | 179 | KVDVWSLGVILYELLTGKLPFPGIDPLEELFRIKERPRLRLPLPPNCSEELKDLIKKCLN | 238 |
| NOV 3: | 366 | HVPSQRPLMREVLEYPWI 383 | |
| | | \| +\|\| +\|+\| +\|\| | |
| Sbjct: | 239 | KDPEKRPTAKEILNHPWF 256 | |

[0153] TABLE 4G
Domain Analysis of NOV4

gnl|Smart|smart00219, TyrKc, Tyrosine kinase, catalytic domain;
Phosphotransferases. Tyrosine-specific kinase subfamily (SEQ ID NO:100)
CD-Length = 258 residues, 99.6% aligned
Score = 127 bits (318), Expect = 2e−30

| | | | |
|---|---|---|---|
| NOV 3: | 133 | LEIGRPPGKGKFGNVYLAREKQSKFILALRVLFKAQLEKAGVEHQ--LRREVEIQSHLQH | 190 |
| | | \| +\|+ \|+\| \|\| \|\| \| + + \| \| \| \| + \|\| + \| \| | |
| Sbjct: | 1 | LTLGKKLGEGAFGEVYKGTLKGKGGVE-VEVAVKTLKEDASEQQIEEFLREARLMRKLDH | 59 |
| NOV 3: | 191 | PNIIRLYGYFHDATRVYLILEYTPLETVNTELQKLSK--FDEQRTATYITELASALSYCH | 248 |
| | | \|\|\|++\| \| + + +++\|\| + \|+\| ++ ++\| + \| | |
| Sbjct: | 60 | PNIVKLLGVCTEEEPLMIVMEYMEGGDLLDYLRKNRPKELSLSDLLSFALQIARGMEYLE | 119 |
| NOV 3: | 249 | SKTVIHRDIKPENLLLGSAGELEIANFGWSEHAPSSRRTTLCGTLD----YLPPEMIEGR | 304 |
| | | \|\| +\|\|\|+ \| \|+\| ++\|\|+\|\| + + ++ \|\| ++ | |
| Sbjct: | 120 | SKNFVHRDLAARNCLVGENKTVKIADFGLARDLYDDDYYRKKKSPRLPIRWMAPESLKDG | 179 |
| NOV 3: | 305 | MHDEKVDLWSLGVLCCE-FLVGKPPFEANTYQETYKRISRVEF-TFPDFVTEGARDLISR | 362 |
| | | \| \|+\|\| \|\|\| \| \| +\|+ \|+ + +\| + + + \| + \|\|+ + | |
| Sbjct: | 180 | KFTSKSDVWSFGVLLWEIFTLGESPYPGMSNEEVLEYLKKGYRLPQPPNCPDEIYDLMLQ | 239 |
| NOV 3: | 363 | LLKHVPSQRPMLREVLEY 380 | |
| | | \| \|\| \|++\| | |
| Sbjct: | 240 | CWAEDPEDRPTFSELVER 257 | |

[0154] Amplification of chromosome 20q DNA has been reported in a variety of cancers. DNA amplification on 20q13 has also been correlated with poor prognosis among axillary node-negative breast tumor cases. Sen et al. (1997) cloned a partial cDNA encoding STK15 (also known as BTAK and aurora2) from this amplicon and found that it is amplified and overexpressed in 3 human breast cancer cell lines. STK15 encodes a centrosome-associated kinase. Zhou et al. (1998) found that STK15 is involved in the induction of centrosome duplication-distribution abnormalities and aneuploidy in mammalian cells. Centrosomes appear to maintain genomic stability through the establishment of bipolar spindles during cell division, ensuring equal segregation of replicated chromosomes to 2 daughter cells. Deregulated duplication and distribution of centrosomes are implicated in chromosome segregation abnormalities, leading to aneuploidy seen in many cancer cell types. Zhou et al. (1998) found amplification of STK15 in approximately 12% of primary breast tumors, as well as in breast, ovarian, colon, prostate, neuroblastoma, and cervical cancer cell lines. Additionally, high expression of STK15 mRNA was detected in tumor cell lines without evidence of gene amplification. Ectopic expression of STK15 in mouse NIH 3T3 cells led to the appearance of abnormal centrosome number (amplification) and transformation in vitro. Finally, overexpression of STK15 in near-diploid human breast epithelial cells revealed similar centrosome abnormality, as well as induction of aneuploidy. These findings suggested that STK15 is a critical kinase-encoding gene, whose overexpression leads to centrosome amplification, chromosomal instability, and transformation in mammalian cells. Zhou et al. (1998) found that the open reading frame of the full-length STK15 cDNA sequence encodes a 403-amino acid protein with a molecular mass of approximately 46 kD. STK6 (602687), also referred to as AIK, is highly homologous to STK15. The Drosophila ‘aurora’ and S. cerevisiae Ipl1 STKs are involved in mitotic events such as centrosome separation and chromosome segregation. Using a degenerate primer-based PCR method to screen for novel STKs, Shindo et al. (1998) isolated mouse and human cDNAs encoding STK15, which they termed ARK1 (aurora-related kinase-1). Cell cycle and Northern blot analyses showed that peak expression of STK15 occurs during the G2/M phase and then decreases. By interspecific backcross mapping, Shindo et al. (1998) mapped the mouse Stk15 gene to the distal region of chromosome 2 in a region showing homology of synteny with human 20q The disclosed NOV4 nucleic acid of the invention encoding a Aurora-related kinase 1-like protein includes the nucleic acid whose sequence is provided in Table 4A or a fragment thereof. The invention also includes a mutant or variant nucleic acid any of whose bases may be changed from the corresponding base shown in Table 4A while still encoding a protein that maintains its Aurora-related kinase 1-like activities and physiological functions, or a fragment of such a nucleic acid. The invention further includes nucleic acids whose sequences are complementary to those just described, including nucleic acid fragments that are complementary to any of the nucleic acids just described. The invention additionally includes nucleic acids or nucleic acid fragments, or complements thereto, whose structures include chemical modifications. Such modifications include, by way of nonlimiting example, modified bases, and nucleic acids whose sugar phosphate backbones are modified or derivatized. These modifications are carried out at least in part to enhance the chemical stability of the modified nucleic acid, such that they may be used, for example, as antisense binding nucleic acids in therapeutic applications in a subject. In the mutant or variant nucleic acids, and their complements, up to about 5 percent of the bases may be so changed.

[0155] The disclosed NOV4 protein of the invention includes the Aurora-related kinase 1-like protein whose sequence is provided in Table 4B. The invention also includes a mutant or variant protein any of whose residues may be changed from the corresponding residue shown in Table 4B while still encoding a protein that maintains its Aurora-related kinase 1-like activities and physiological functions, or a functional fragment thereof. In the mutant or variant protein, up to about 9 percent of the residues may be so changed.

[0156] The protein similarity information, expression pattern, and map location for the Aurora-related kinase 1-like protein and nucleic acid (NOV4) disclosed herein suggest that NOV4 may have important structural and/or physiological functions characteristic of the citron kinase-like family. Therefore, the NOV4 nucleic acids and proteins of the invention are useful in potential diagnostic and therapeutic applications. These include serving as a specific or selective nucleic acid or protein diagnostic and/or prognostic marker, wherein the presence or amount of the nucleic acid or the protein are to be assessed, as well as potential therapeutic applications such as the following: (i) a protein therapeutic, (ii) a small molecule drug target, (iii) an antibody target (therapeutic, diagnostic, drug targeting/cytotoxic antibody), (iv) a nucleic acid useful in gene therapy (gene delivery/gene ablation), and (v) a composition promoting tissue regeneration in vitro and in vivo.

[0157] The NOV4 nucleic acids and proteins of the invention are useful in potential diagnostic and therapeutic applications implicated in various diseases and disorders described below. For example, the compositions of the present invention will have efficacy for treatment of patients suffering from breast, ovarian, colon, prostate, neuroblastoma, and cervical cancer, Cardiomyopathy, Atherosclerosis, Hypertension, Congenital heart defects, Aortic stenosis, Atrial septal defect (ASD), Atrioventricular (A-V) canal defect, Ductus arteriosus, Pulmonary stenosis, Subaortic stenosis, Ventricular septal defect (VSD), valve diseases, Tuberous sclerosis, Scleroderma, Obesity, Transplantation, Diabetes, Von Hippel-Lindau (VHL) syndrome, Pancreatitis, Alzheimer's disease, Stroke, hypercalceimia, Parkinson's disease, Huntington's disease, Cerebral palsy, Epilepsy, Lesch-Nyhan syndrome, Multiple sclerosis, Ataxia-telangiectasia, Leukodystrophies, Behavioral disorders, Addiction, Anxiety, Pain, and Neuroprotection and/or other pathologies. The NOV4 nucleic acid, or fragments thereof, may further be useful in diagnostic applications, wherein the presence or amount of the nucleic acid or the protein are to be assessed.

[0158] NOV4 nucleic acids and polypeptides are further useful in the generation of antibodies that bind immunospecifically to the novel substances of the invention for use in therapeutic or diagnostic methods. These antibodies may be generated according to methods known in the art, using prediction from hydrophobicity charts, as described in the “Anti-NOVX Antibodies” section below. For example the disclosed NOV4 protein have multiple hydrophilic regions, each of which can be used as an immunogen. In one embodiment, contemplated NOV4 epitope is from about amino acids 1 to 10. In another embodiment, a NOV4 epitope is from about amino acids 15 to 160. In additional embodiments, NOV4 epitopes are from about amino acids 175 to 210, from about amino acids 220 to 240, from about amino acids 250 to 270, from about amino acids 280 to 320, from about amino acids 340 to 375, and from about amino acids 380 to 400. This novel protein also has value in development of powerful assay system for functional analysis of various human disorders, which will help in understanding of pathology of the disease and development of new drug targets for various disorders.

[0159] NOV5

[0160] A disclosed NOV5 nucleic acid of 1500 nucleotides (designated CuraGen Acc. No. SC44326718_A) encoding a novel 26S protease regulatory subunit 4-like protein is shown in Table 5A. An open reading frame was identified beginning with an ATG initiation codon at nucleotides 101-103 and ending with a TAG codon at nucleotides 1427-1429. A putative untranslated region downstream from the termination codon is underlined in Table 5A, and the start and stop codons are in bold letters.

TABLE 5A
NOV5 Nucleotide Sequence

(SEQ ID NO:15)

GTATCCCCAAGAGAAAATACGCATCAAAAATTAGGAACTTAGAAATGATAGTTGAGGTGGAGGAACTTCC
AGCAGTGGCAGCTCAAGTGGCCAAGACAAGATGGGTCAAAGTCAGGGTGATGGTCATGGTCCTAGACGTG
GCAAGAAGGATGAAAAGGACAAGAAAAATAAGTACGAACCTCTTGTACCAACTAGAGTGGCGGAAAAAGA
AGAAAAAACAAAGGGACAAGATGTTGCCAGTAAACTGCCACTGGTGACACTTCACACTCAGTGTCGGTTA
AAATTACTGAAGTTAGAGAGAATTAAAGACTACCTTCTCATGGTGGAAGAATTCATTAGAAATCAGGAAC
AAATAAAACTATTAGAAGAAAAGCAAGAGGAGGGAAGATCAAAAGTGGATGATCTGAGGGGGACCCCAAT
GTCAGTAGGAAACTTGGAAGAGATCATCGATGACAATCATGCCATTGTGTCTACATCTGTGGGCTCAGAA
CACTATGACAGCATTATTTCATTTGTAGAGAAGGATCTGCTGGAACCTGGCTGCTCGATTCTGCTCAGAC
ACAAGGTACATGCGGTGATAGGGGTGCTGATGGATGATACGGGTCCCCTGGTCACAATGATGAAGGTGGA
GAAGGCCCCCCAGGAGACCTATGTCAATACTGGGGGGTTGGACAACCAAATTCAGGAAATTAAGGAATCT
ATGGAGCTTCCTCTCCCCCATCCTGAATATTATGAAGAGATGGGTACAAAGCCTCCTAAAGGGGTCATTC
TCTGTGGTCCACCTGGCACAGGTAAAACCTTGTTAGCCAAAGCAGTAGCAAACCAAACCTCAGCCACTTT
CTTGAGAGTGGTTGGCTCTGAACTTATTCAGAAGTACCTAGGTGATGGGCCCAAACTCGTACGGCAAGTA
TTTCAAGTTGCTGAAGAACATGCACCATCCATCATGTTTACTGATGAAATTGAAGCCATTGGGACAAAAA
GATATGACTCCAATTCTGGTGGTGAGAGAGAAATTCAGCAAACAATGTTGGAATTGGAACTGTTGAACCA
ATTGGGTGGATTTGATTCTAGGGAAGATGTGAAAGTTATCATGGCCACAAAACAAGTAGAAACTTTGGAT
CCAGTACTTATCAGACCAGGCCGCATTGACAAGAAGATCGAGTTCCACCTGCCTGATGAAAAGACTAAGA
AGCACATCTTTCAGATTCACACAAGCAGGATGACACTGGCCAATGATGTAACCCTGGACGACTTGATCAT
GGCTAAAGATGACTTCTCTGGTGCTGACATCAAGGCAATCTGTACAGAAGCTGGTCTGATGGCCTTAAGA
GAACATAGAATGAAAGCAACAAATGAAGACTTCAAAAAATCTATAGAAAGTGTTCTTTATAAGAAACACG
AAGGCATCCCTGAGGGGCTTTATCTCTAGTGAACCACCGCTGCCATCAGGAAGATGGTTGGGAGATTTCC
CAACCCCTGAAAGGGATGAGGTTGGGGGAG

[0161] The nucleic acid sequence NOV5, located on chromosome 5 has 1347 of 1447 bases (93%) identical to a gb:GENBANK-ID:HUM26SPSIV|acc:L02426 mRNA from Homo sapiens (Human 26S protease (S4) regulatory subunit mRNA, complete cds (E=2.4e⁻²⁷⁷).

[0162] A NOV5 polypeptide (SEQ ID NO: 16) encoded by SEQ ID NO: 15 is 442 amino acid residues and is presented using the one letter code in Table 5B. Signal P, Psort and/or Hydropathy results predict that NOV5 has no signal peptide and is likely to be localized in the cytoplasm with a certainty of 0.4500. In other embodiments, NOV5 may also be localized to the microbody (peroxisome) with a certainty of 0.3000, the mitochondrial matrix space with a certainty of 0.1000, or the lysosome (lumen) with a certainty of 0.1000.

TABLE 5B
NOV5 protein sequence

(SEQ ID NO:16)

[sequence omitted]

[0163] The full amino acid sequence of the protein of the invention was found to have 383 of 442 amino acid residues (86%) identical to, and 405 of 442 amino acid residues (91%) similar to, the 440 amino acid residue ptnr:SWISSPROT-ACC:P49014 protein from Mus musculus (Mouse), and Rattus norvegicus (Rat) (26S Protease Regulatory Subunit 4 (P26S4) (E=1.7e⁻²⁰⁰)

[0164] NOV5 also has homology to the amino acid sequences shown in the BLASTP data listed in Table 5C.

TABLE 5C
BLAST results for NOV5

| Gene Index/ | | Length | Identity | Positives | |
|---|---|---|---|---|---|
| Identifier | Protein/Organism | (aa) | (%) | (%) | Expect |
| gi\|4506207\|ref\|NP_002793.1\| | proteasome | 440 | 382/442 | 405/442 | 0.0 |
| (NM_002802) | (prosome, | | (86%) | (91%) | |
| | macropain) 26S | | | | |
| | subunit, ATPase, | | | | |
| | 1; Proteasome 26S | | | | |
| | subunit, ATPase, 1 | | | | |
| | [Homo sapiens] | | | | |
| gi\|6679501\|ref\|NP_032973.1\| | protease (prosome, | 440 | 383/442 | 405/442 | 0.0 |
| (NM_008947) | macropain) 26S | | (86%) | (90%) | |
| | subunit, ATPase 1 | | | | |
| | [Mus musculus] | | | | |
| gi\|345717\|pir\|\|A44468 | 26S proteasome | 440 | 381/442 | 404/442 | 0.0 |
| | regulatory chain 4 | | (86%) | (91%) | |
| | [validated] - | | | | |
| | human | | | | |
| gi\|16741033\|gb\|AAH16368.1\| | protease (prosome, | 440 | 382/442 | 404/442 | 0.0 |
| AAH16368 | macropain) 26S | | (86%) | (90%) | |
| (BC016368) | subunit, ATPase 1 | | | | |
| | [Homo sapiens] | | | | |
| gi\|2492516\|sp\|Q90732\| | 26S PROTEASE | 440 | 378/442 | 402/442 | 0.0 |
| PRS4_CHICK | REGULATORY SUBUNIT | | (85%) | (90%) | |
| | 4 (P26S4) | | | | |

[0165] The homology of these sequences is shown graphically in the ClustalW analysis shown in Table SD. V,23-24/2

[0166] Tables 5E-F list the domain description from DOMAIN analysis results against NOV5. This indicates that the NOV5 sequence has properties similar to those of other proteins known to contain this domain.

TABLE 5E
Domain Analysis of NOV5

gnl|pfam|pfam00004, AAA, ATPase family associated with various
cellular activities (AAA). AAA family proteins often perform
chaperone-like functions that assist in the assembly, operation, or
disassembly of protein complexes (SEQ ID NO:101)
CD-Length = 186 residues, 100.0% aligned
Score = 190 bits (483), Expect = 1e−49

| | | | |
|---|---|---|---|
| NOV 4: | 221 | GVILCGPPGTGKTLLAKAVANQTSATFLRVVGSELIQKYLGDGPKLVRQVFQVAEEHAPS | 280 |
| | | \|++\| \|\|\|\|\|\|\|\|\|\|\|\|\|\|\| + \|+ + \|\|\|\|+ \|\|+\|+ \|\|\|\| +\| +\| + \|\| | |
| Sbjct: | 1 | GILLYGPPGTGKTLLAKAVAKELGVPFIEISGSELLSKYVGESEKLVRALFSLARKSAPC | 60 |
| NOV 4: | 281 | IMFTDEIEAIGTKRYDSNSGGEREIQQTMLELELLNQLGGFDSREDVKVIMATKQVETLD | 340 |
| | | \|+\| \|\|\|+\|+ \|\| \| +\| + +\|\| ++ \|\|+ +\| \|\| \|\| + + \|\| | |
| Sbjct: | 61 | IIFIDEIDALAPKRGDVGTGDVSS----RVVNQLLTEMDGFEKLSNVIVIGATNRPDLLD | 116 |
| NOV 4: | 341 | PVLIRPGRIDKKIEFHLPDEKTKKHIFQIHTSRMTLANDVTLDDLIMAKDDFSGADIKAI | 400 |
| | | \| \|+\|\|\|\| \|++\|\| \|\|\|\|+ + \| +\|\| + \| \|\| \|\|++ \|\|\|\|\|+ \|+ | |
| Sbjct: | 117 | PALLRPGRFDRRIEVPLPDEEERLEILKIHLKKKPLEKDVDLDEIARRTPGFSGADLAAL | 176 |
| NOV 4: | 401 | CTEAGLMALR 410 | |
| | | \| \|\| \| \|+\| | |
| Sbjct: | 177 | CREAALRAIR 186 | |

[0167] TABLE 5F
Domain Analysis of NOV5

gnl|Smart|smart00382, AAA, ATPases associated with a variety of
cellular activities; AAA. This profile/alignment only detects a
fraction of this vast family. The poorly conserved N-terminal helix is
missing from the alignment. (SEQ ID NO:102)
CD-Length = 151 residues, 100.0% aligned
Score = 61.6 bits (148), Expect = 9e−11

| | | | |
|---|---|---|---|
| NOV 4: | 218 | PPKGVILCGPPGTGKTLLAKAVANQTSATFLRVV-------------------GSELIQK | 258 |
| | | \| + \|++ \|\|\|\|+\|\|\| \|\|+\|+\| + \|+ \| | |
| Sbjct: | 1 | PGEVVLIVGPPGSGKTTLARALARELGPDGGGVIYIDGEDLREEALLQLLRLLVLVGEDK | 60 |
| NOV 4: | 259 | YLGDGPKLVRQVFQVAEEHAPSIMFTDEIEAIGTKRYDSNSGGEREIQQTMLELELLNQL | 318 |
| | | \| \| + +\| +\| + \| ++ \|\|\| ++ + +\| \|\|\| \| | |
| Sbjct: | 61 | LSGSGGQRIRLALALARKLKPDVLILDEITSLLDAEQE---------ALLLLLEELLRLL | 111 |
| NOV 4: | 319 | GGFDSREDVKVIMATKQVETLDPVLIRPGRIDKKIEFHLPD 359 | |
| | | \|+\| \|\| \| \| \| \|+\| \| \|++\| | |
| Sbjct: | 112 | LLLLKEENVTVIATTNDETDLIPALLRR-RFDRRIVLLRIL 151 | |

[0168] Ubiquitinated proteins are degraded by a 26S ATP-dependent protease. The protease is composed of a 20S catalytic proteasome and 2 PA700 regulatory modules. The PA700 complex is composed of multiple subunits, including at least 6 related ATPases and approximately 15 non-ATPase polypeptides. Tanahashi et al. (1998) stated that each of the 6 ATPases, namely PSMC1, PSMC2 (154365), PSMC3 (186852), PSMC4 (602707), PSMC5 (601681), and PSMC6 (602708), contains an AAA (ATPases associated with diverse cellular activities) domain (see PSMC5). Dubiel et al. (1992) cloned cDNAs encoding subunit 4 (S4) of the 26S protease by screening a HeLa cell cDNA library with probes that were produced using the protein sequence. The 440-amino acid protein has a molecular mass of 51 kD by SDS-PAGE. By fluorescence in situ hybridization, Tanahashi et al. (1998) mapped the human PSMC1 gene to 19p13.3. Hoyle and Fisher (1996) found that the human and mouse PSMC1 proteins have 99% amino acid identity. They reported that the mouse Psmc1 gene contains at least 11 exons. By analysis of an interspecific backcross, Hoyle and Fisher (1996) mapped the mouse Psmc1 gene to chromosome 12. Nomenclature note: The PSMC1 gene product, which Dubiel et al. (1992) called subunit 4 (S4), is distinct from the PSMC4 (602707) gene product.

[0169] The disclosed NOV5 nucleic acid of the invention encoding a 26S protease regulatory subunit 4-like protein includes the nucleic acid whose sequence is provided in Table 5A or a fragment thereof. The invention also includes a mutant or variant nucleic acid any of whose bases may be changed from the corresponding base shown in Table 5A while still encoding a protein that maintains its 26S protease regulatory subunit 4-like activities and physiological functions, or a fragment of such a nucleic acid. The invention further includes nucleic acids whose sequences are complementary to those just described, including nucleic acid fragments that are complementary to any of the nucleic acids just described. The invention additionally includes nucleic acids or nucleic acid fragments, or complements thereto, whose structures include chemical modifications. Such modifications include, by way of nonlimiting example, modified bases, and nucleic acids whose sugar phosphate backbones are modified or derivatized. These modifications are carried out at least in part to enhance the chemical stability of the modified nucleic acid, such that they may be used, for example, as antisense binding nucleic acids in therapeutic applications in a subject. In the mutant or variant nucleic acids, and their complements, up to about 7 percent of the bases may be so changed.

[0170] The disclosed NOV5 protein of the invention includes the 26S protease regulatory subunit 4-like protein whose sequence is provided in Table 5B. The invention also includes a mutant or variant protein any of whose residues may be changed from the corresponding residue shown in Table 5B while still encoding a protein that maintains its 26S protease regulatory subunit 4-like activities and physiological functions, or a functional fragment thereof. In the mutant or variant protein, up to about 14 percent of the residues may be so changed.

[0171] The protein similarity information, expression pattern, and map location for the 26S protease regulatory subunit 4-like protein and nucleic acid (NOV5) disclosed herein suggest that this NOV5 protein may have important structural and/or physiological functions characteristic of the 26S protease regulatory subunit 4 family. Therefore, the NOV5 nucleic acids and proteins of the invention are useful in potential diagnostic and therapeutic applications. These include serving as a specific or selective nucleic acid or protein diagnostic and/or prognostic marker, wherein the presence or amount of the nucleic acid or the protein are to be assessed, as well as potential therapeutic applications such as the following: (i) a protein therapeutic, (ii) a small molecule drug target, (iii) an antibody target (therapeutic, diagnostic, drug targeting/cytotoxic antibody), (iv) a nucleic acid useful in gene therapy (gene delivery/gene ablation), and (v) a composition promoting tissue regeneration in vitro and in vivo.

[0172] The NOV5 nucleic acids and proteins of the invention are useful in potential diagnostic and therapeutic applications implicated in various diseases and disorders described below. For example, the compositions of the present invention will have efficacy for treatment of patients suffering from cataract and Aphakia, Alzheimer's disease, neurodegenerative disorders, inflammation and modulation of the immune response, viral pathogenesis, aging-related disorders, neurologic disorders, cancer and/or other pathologies. The NOV5 nucleic acids, or fragments thereof, may further be useful in diagnostic applications, wherein the presence or amount of the nucleic acid or the protein are to be assessed.

[0173] NOV5 nucleic acids and polypeptides are further useful in the generation of antibodies that bind immunospecifically to the novel substances of the invention for use in therapeutic or diagnostic methods. These antibodies may be generated according to methods known in the art, using prediction from hydrophobicity charts, as described in the “Anti-NOVX Antibodies” section below. For example, the disclosed NOV5 protein has multiple hydrophilic regions, each of which can be used as an immunogen. In one embodiment, a contemplated NOV5 epitope is from about amino acids 5 to 50. In another embodiment, a NOV5 epitope is from about amino acids 75 to 125. In additional embodiments, NOV5 epitopes are from about amino acids 175 to 225, from about amino acids 280 to 320, from about amino acids 330 to 380, and from about amino acids 390 to 440. These novel proteins can be used in assay systems for functional analysis of various human disorders, which will help in understanding of pathology of the disease and development of new drug targets for various disorders.

[0174] NOV6

[0175] A disclosed NOV6 nucleic acid of 1020 nucleotides (also referred to as GMAC073364_A_da1) encoding a novel MITSUGUMIN29-like protein is shown in Table 6A. An open reading frame was identified beginning with an ATG initiation codon at nucleotides 2-4 and ending with a TAA codon at nucleotides 818-820. Putative untranslated regions upstream from the initiation codon and downstream from the termination codon are underlined in Table 6A, and the start and stop codons are in bold letters.

TABLE 6A
NOV6 Nucleotide Sequence

| | |
|---|---|
| CATGTCCTCGACCGAGAGCGCCGGCCGCACGGCGGACAAGTCGCCGCGCCAGCAGGTGGACC | (SEQ ID NO:17) |
| GCCTACTCGTGGGGCTGCGCTGGCGGCGGCTGGAGGAGCCGCTGGGCTTCATCAAAGTTCTC | |
| CAGTGGCTCTTTGCTATTTTCGCCTTCGGGTCCTGTGGCTCCTACAGCGGGGAGACAGGAGC | |
| AATGGTTCGCTGCAACAACGAAGCCAAGGACGTGAGCTCCATCATCGTTGCATTTGGCTATC | |
| CCTTCAGGTTGCACCGGATCCAATATGAGATGCCCCTCTGCGATGAAGAGTCCAGCTCCAAG | |
| ACCATGCACCTCATGGGGGACTTCTCTGCACCCGCCGAGTTCTTCGTGACCCTTGGCATCTT | |
| TTCCTTCTTCTATACCATGGCTGCCCTAGTTATCTACCTGCGCTTCCACAACCTCTACACAG | |
| AGAAGAAACGCTTCCCGCTGGTGGACTTCTGTGTGACTGTCTCCTTCACCTTCTTCTGGCTG | |
| GTAGCTGCAGCTGCCTGGGGCAAGGGCCTGACCGATGTCAAGGGGGCCACACGACCATCCAG | |
| CTTGACAGCAGCCATGTCAGTGTGCCATGGAGAGGAAGCAGTGTGCAGTGCCGGGGCCACGC | |
| CCTCTATGGGCCTGGCCAACATCTCCGTGCTCTTTGGCTTTATCAACTTCTTCCTGTGGGCC | |
| GGGAACTGTTGGTTTGTGTTCAAGGAGACCCCGTGGCATGGACAGGGCCAGGGCCAGGACCA | |
| GGACCAGGACCAGGACCAGGGCCAGGGTCCCAGCCAGGAGAGTGCAGCTGAGCAGGGAGCAG | |
| TGGAGAAGCAGTAAGCAGCCCCCCACCT | |

[0176] The NOV6 nucleic acid was identified on chromosome 3 and has 727 of 805 bases (90%) identical to a gb:GENBANK-ID:AB004816|acc:AB004816.1 mRNA from Oryctolagus cuniculus (Oryctolagus cuniculus mRNA for mitsugumin29, complete cds (E=2.5e⁻¹⁴²).

[0177] A disclosed NOV6 polypeptide (SEQ ID NO: 18) encoded by SEQ ID NO: 17 is 272 amino acid residues and is presented using the one-letter code in Table 6B. Signal P, Psort and/or Hydropathy results predict that NOV6 has a signal peptide and is likely to be localized on the plasma membrane with a certainty of 0.6000. In other embodiments, NOV6 may also be localized to the Golgi body with acertainty of 0.4000, the endoplasmic reticulum (membrane) with a certainty of 0.3000, or the nucleus with a certainty of 0.1000. The most likely celavage site for NOV6 is between positions 57 and 58, SYS-GE.

TABLE 6B
Encoded NOV6 protein sequence

(SEQ ID NO:18)

MSSTESAGRTADKSPRQQVDRLLVGLRWRRLEEPLGFIKVLQWLFAIFAF
GSCGSYSGETGAMVRCNNEAKDVSSIIVAFGYPFRLHRIQYEMPLCDEES
SSKTMHLMGDFSAPAEFFVTLGIFSFFYTMAALVIYLRFHNLYTENKRFP
LVDFCVTVSFTFFWLVAAAAWGKGLTDVKGATRPSSLTAAMSVCHGEEAV
CSAGATPSMGLANISVLFGFINFFLWAGNCWFVFKETPWHGQGQGQDQDQ
DQDQGQGPSQESAAEQGAVEKQ

[0178] The disclosed NOV6 amino acid sequence has 727 of 805 amino acid residues (90%) identical to, and 727 of 805 amino acid residues (90%) similar to, the 3489 amino acid residue gb:GENBANK-ID:AB004816|acc:AB004816.1 protein from Oryctolagus cuniculus (Oryctolagus cuniculus mRNA for mitsugumin29, complete cds) (E=2.5e⁻¹⁴²).

[0179] Based on the semi quantitative PCR, NOV6 is specially expressed in: Skeletal muscle, Heart, Kidney, Adrenal gland and one of the Lung cancer cell lines (Lung cancer NCI-H522) at a measurably higher level than the following tissues: Endothelial cells, Pancreas, Thyroid, Salivary gland, Pituitary gland, Brain (fetal), Brain (whole), Brain (amygdala), Brain (cerebellum), Brain (hippocampus), Brain (thalamus), Cerebral Cortex, Spinal cord, Bone marrow, Thymus, Spleen, Lymph node, Colorectal, Stomach, Small intestine, Bladder, Trachea, Kidney (fetal), Liver, Liver (fetal), Lung, Lung (fetal), Mammary gland, Ovary, Uterus, Placenta, Prostate, Testis, Melanoma, Adipose and cancer cell lines including Breast cancer, CNS cancer, Colon cancer, Gastric cancer, Lung cancer (except Lung cancer NCI-H522 ), Ovarian cancer, Pancreatic cancer, and Renal cancer.

[0180] In addition, NOV6 is predicted to be expressed in skeletal muscle because of the expression pattern of (GENBANK-ID: gb:GENBANK-ID:AB004816|acc:AB004816.1) a closely related mitsugumin29 homolog in Oryctolagus cuniculus.

[0181] NOV6 also has homology to the amino acid sequences shown in the BLASTP data listed in Table 6C.

TABLE 6C
BLAST results for NOV6

| Gene Index/ | | Length | Identity | Positives | |
|---|---|---|---|---|---|
| Identifier | Protein/Organism | (aa) | (%) | (%) | Expect |
| gi\|3077703\|dbj\|BAA25784.1\| | mitsugumin29 | 264 | 252/272 | 256/272 | e−136 |
| (AB004816) | [Oryctolagus | | (92%) | (93%) | |
| | cuniculus] | | | | |
| gi\|6678874\|ref\|NP_032622.1\| | mitsugumin 29 | 264 | 246/272 | 258/272 | e−133 |
| (NM_008596) | [Mus musculus] | | (90%) | (94%) | |
| gi\|12836843\|dbj\|BAB23831.1\| | putative [Mus | 285 | 118/251 | 158/251 | 7e−59 |
| (AK005132) | musculus] | | (47%) | (62%) | |
| gi\|1351168\|sp\|P20488\| | SYNAPTOPHYSIN | 307 | 109/221 | 145/221 | 3e−58 |
| SYPH_BOVIN | (MAJOR SYNAPTIC | | (49%) | (65%) | |
| | VESICLE PROTEIN | | | | |
| | P38) | | | | |
| gi\|2134413\|pir\|\|I50720 | synaptophysin IIa - | 268 | 109/217 | 142/217 | 4e−57 |
| | chicken | | (50%) | (65%) | |

[0182] The homology of these sequences is shown graphically in the ClustalW analysis shown in Table 6D.

[image]

[image]

[0183] Table 6E lists the domain description from DOMAIN analysis results against NOV6. This indicates that the NOV6 sequence has properties similar to those of other proteins known to contain this domain.

TABLE 6E
Domain Analysis of NOV6

gnl|Pfam|pfam01284, Synaptophysin, Synaptophysin/synaptoporin.
(SEQ ID NO:103)
CD-Length = 298 residues, 70.8% aligned
Score = 244 bits (622), Expect = 6e−66

| | | | |
|---|---|---|---|
| NOV 5: | 29 | RRLEEPLGFIKVLQWLFAIFAFGSCGSYSGETGAMVRCNNEAKDVSSIIVAFGYPFRLHR | 88 |
| | | + \|\|\|\|+\|\|\|\|\|+\|\|\|\|\|\| +\|\| \|\|\|\| \| \| \|+ + +\| +\|\| \|\|\|\|\|\| | |
| Sbjct: | 3 | MVIFAPLGFVKVLQWVFAIFAFATCGGYSGELQLSVDCANKTESDLNIDIAFAYPFRLHE | 62 |
| NOV 5: | 89 | IQYEMPLCDEESSSKTMHLMGDFSAPAEFFVTLGIFSFFYTMAALVIYLRFHNLYTENKR | 148 |
| | | + +\| \| \| \| \| + \|+\|\| \|+ \|\|\|\|\|\|+ +\|+\| \|++\|\|\| \|+ \| \| \| \|\| + | |
| Sbjct: | 63 | VTFEAPTC-EGDEKKNIALVGDSSSSAEFFVTVAVFAFLYSLAALATYIFFQNKYRENNK | 121 |
| NOV 5: | 149 | FPLVDFCVTVSFTFFWLVAAAAWGKGLTDVKGATRPSSLTAAMSVCHGEEAVCSAGATPS | 208 |
| | | \|\|+\|\| \| \| \| \|\|\| ++\|\| \|\|\|+\|\|\| \|\| \| + \| \|\| \| \| | |
| Sbjct: | 122 | GPLIDFIATAVFAFLWLVGSSAWAKGLSDVKMATDPEEIIKGMHACHQPGNKCKELHDPV | 181 |
| NOV 5: | 209 | MGLANISVLFGFINFFLWAGNCWFVFKETPWH 240 | |
| | | \| \| \|\|+\|\|\|+\|\| \|\|\|\|\| \|\|\|\|\|\|\| \| | |
| Sbjct: | 182 | MSGLNTSVVFGFLNFILWAGNIWFVFKETGWA 213 | |

[0184] In skeletal muscle, excitation-contraction (E-C) coupling requires the conversion of the depolarization signal of the invaginated surface membrane, namely the transverse (T-) tubule, to Ca2+ release from the sarcoplasmic reticulum (SR) (Takeshima H et al., Biochem J April 1998 1;331 (Pt 1):317-22/PMID: 9512495, UI: 98180964). Signal transduction occurs at the junctional complex between the T-tubule and SR, designated as the triad junction, which contains two components essential for E-C coupling, namely the dihydropyridine receptor as the T-tubular voltage sensor and the ryanodine receptor as the SR Ca2+-release channel. However, functional expression of the two receptors seemed to constitute neither the signal-transduction system nor the junction between the surface and intracellular membranes in cultured cells, suggesting that some as-yet-unidentified molecules participate in both the machinery. In addition, the molecular basis of the formation of the triad junction is totally unknown. It is therefore important to examine the components localized to the triad junction. Takeshima et al. report the identification using monoclonal antibody and primary structure by cDNA cloning of mitsugumin29, a novel transmembrane protein from the triad junction in skeletal muscle. This protein is homologous in amino acid sequence and shares characteristic structural features with the members of the synaptophysin family. The subcellular distribution and protein structure suggest that mitsugumin29 is involved in communication between the T-tubular and junctional SR membranes.

[0185] Physiological roles of the members of the synaptophysin family, carrying four transmembrane segments and being basically distributed on intracellular membranes including synaptic vesicles, have not been established yet (Nishi M et al., J Cell Biol December 1998 27;147(7):1473-80/PMID: 10613905, UI: 20082885). Recently, mitsugumin29 (MG29) was identified as a novel member of the synaptophysin family from skeletal muscle. MG29 is expressed in the junctional membrane complex between the cell surface transverse (T) tubule and the sarcoplasmic reticulum (SR), called the triad junction, where the depolarization signal is converted to Ca(2+) release from the SR. In this study, Nishi et al. examined biological functions of MG29 by generating knockout mice. The MG29-deficient mice exhibited normal health and reproduction but were slightly reduced in body weight. Ultrastructural abnormalities of the membranes around the triad junction were detected in skeletal muscle from the mutant mice, i.e., swollen T tubules, irregular SR structures, and partial misformation of triad junctions. In the mutant muscle, apparently normal tetanus tension was observed, whereas twitch tension was significantly reduced. Moreover, the mutant muscle showed faster decrease of twitch tension under Ca(2+)-free conditions. The morphological and functional abnormalities of the mutant muscle seem to be related to each other and indicate that MG29 is essential for both refinement of the membrane structures and effective excitation-contraction coupling in the skeletal muscle triad junction. These results further imply a role of MG29 as a synaptophysin family member in the accurate formation of junctional complexes between the cell surface and intracellular membranes.

[0186] The temporal appearance and subcellular distribution of mitsugumin29 (MG29), a 29-kDa transmembrane protein isolated from the triad junction in skeletal muscle, were examined by immunohistochemistry during the development of rabbit skeletal muscle (Komazaki S et al., Dev Dyn June 1999 ;215(2):87-95/PMID: 10373013, UI: 99300228). MG29 appeared in the sarcoplasmic reticulum (SR) in muscle cells at fetal day 15 before the onset of transverse tubule (T tubule) formation. In muscle cells at fetal day 27, in which T tubule and triad formation is ongoing, both SR and triad were labeled for MG29. In muscle cells at newborn 1 day, the labeling of the SR had become weak and the triads were well developed and clearly labeled for MG29. Specific and clear labeling for MG29 was restricted to the triads in adult skeletal muscle cells. When MG29 was expressed in amphibian embryonic cells by injection of the cRNA, a large quantity of tubular smooth-surfaced endoplasmic reticulum (sER) was formed in the cytoplasm. The tubular sER was 20-40 nm in diameter and appeared straight or reticular in shape. The tubular sER was formed by the fusion of coated vesicles [budded off from the rough-surfaced endoplasmic reticulum (rER)] and vacuoles of rER origin. The present results suggest that MG29 may play important roles both in the formation of the SR and the construction of the triads during the early development of skeletal muscle cells.

[0187] Recently mitsugumin29 unique to the triad junction in skeletal muscle was identified as a novel member of the synaptophysin family; the members of this family have four transmembrane segments and are distributed on intracellular vesicles. In this study, Shimuta et al. FEBS Lett July 1998 17;431(2):263-7/PMID: 9708916, UI: 98372647, isolated and analyzed mouse mitsugumin29 cDNA and genomic DNA containing the gene. The mitsugumin29 gene mapped to the mouse chromosome 3 F3-H2 is closely related to the synaptophysin gene in exon-intron organization, which indicates their intimate relationship in molecular evolution. RNA blot hybridization and immunoblot analysis revealed that mitsugumin29 is expressed abundantly in skeletal muscle and at lower levels in the kidney. Immunofluorescence microscopy demonstrated that mitsugumin29 exists specifically in cytoplasmic regions of the proximal and distal tubule cells in the kidney. The results obtained may suggest that mitsugumin29 is involved in the formation of specialized endoplasmic reticulum systems in skeletal muscle and renal tubule cells.

[0188] The disclosed NOV6 nucleic acid of the invention encoding a MITSUGUMIN29-like protein includes the nucleic acid whose sequence is provided in Table 6A or a fragment thereof. The invention also includes a mutant or variant nucleic acid any of whose bases may be changed from the corresponding base shown in Table 6A while still encoding a protein that maintains its MITSUGUMIN29-like activities and physiological functions, or a fragment of such a nucleic acid. The invention further includes nucleic acids whose sequences are complementary to those just described, including nucleic acid fragments that are complementary to any of the nucleic acids just described. The invention additionally includes nucleic acids or nucleic acid fragments, or complements thereto, whose structures include chemical modifications. Such modifications include, by way of nonlimiting example, modified bases, and nucleic acids whose sugar phosphate backbones are modified or derivatized. These modifications are carried out at least in part to enhance the chemical stability of the modified nucleic acid, such that they may be used, for example, as antisense binding nucleic acids in therapeutic applications in a subject. In the mutant or variant nucleic acids, and their complements, up to about 10 percent of the bases may be so changed.

[0189] The disclosed NOV6 protein of the invention includes the MITSUGUMIN29-like protein whose sequence is provided in Table 6B. The invention also includes a mutant or variant protein any of whose residues may be changed from the corresponding residue shown in Table 6B while still encoding a protein that maintains its MITSUGUMIN29-like activities and physiological functions, or a functional fragment thereof. In the mutant or variant protein, up to about 10 percent of the residues may be so changed.

[0190] The NOV6 nucleic acids and proteins of the invention are useful in potential therapeutic applications implicated in eye/lens disorders including but not limited to muscular dystrophy, Lesch-Nyhan syndrome, myasthenia gravis, diabetes, autoimmune disease, renal artery stenosis, interstitial nephritis, glomerulonephritis, polycystic kidney disease, systemic lupus erythematosus, renal tubular acidosis, IgA nephropathy, hypercalceimia, cardiomyopathy, atherosclerosis, hypertension, congenital heart defects, aortic stenosis, atrial septal defect (ASD), atrioventricular (A-V) canal defect, ductus arteriosus, pulmonary stenosis, subaortic stenosis, ventricular septal defect (VSD), valve diseases, tuberous sclerosis, scleroderma, obesity, transplantation, adrenoleukodystrophy, congenital adrenal hyperplasia, and other diseases, disorders and conditions of the like. Also since the invention is highly expressed in one of the lung cancer cell lines (Lung cancer NCI-H522 ), it may be useful in diagnosis and treatment of this cancer. The NOV6 nucleic acid, or fragments thereof, may further be useful in diagnostic applications, wherein the presence or amount of the nucleic acid or the protein are to be assessed.

[0191] NOV6 nucleic acids and polypeptides are further useful in the generation of antibodies that bind immunospecifically to the novel substances of the invention for use in therapeutic or diagnostic methods. These antibodies may be generated according to methods known in the art, using prediction from hydrophobicity charts, as described in the “Anti-NOVX Antibodies” section below. For example the disclosed NOV6 protein have multiple hydrophilic regions, each of which can be used as an immunogen. In one embodiment, contemplated NOV6 epitope is from about amino acids 10 to 40. In other embodiments, NOV6 epitope is from about amino acids 60 to 70, from about amino acids 90 to 130, from about amino acids 145 to 155, from about amino acid 170 to 180, and from about amino acids 220 to 270. This novel protein also has value in development of powerful assay system for functional analysis of various human disorders, which will help in understanding of pathology of the disease and development of new drug targets for various disorders.

[0192] NOV7

[0193] A disclosed NOV7 nucleic acid of 1020 nucleotides (also referred to as 106973211_EXT) encoding a novel Wnt-15-like protein is shown in Table 7A. An open reading frame was identified beginning with an CTG initiation codon at nucleotides 2-4 and ending with a TAG codon at nucleotides 995-997. A putative untranslated region upstream from the initiation codon and downstream from the termination codon is underlined in Table 7A, and the start and stop codons are in bold letters. Since the starting codon is not a traditional initiation codon, NOV7 could represent a partial reading frame, and could further extend in the 5′ direction.

TABLE 7A
NOV7 Nucleotide Sequence

(SEQ ID NO:19)

CCTGACCGGGCGGGAAGTCCTGACGCCCTTCCCAGGATTGGGCACTGCGGCAGCCCCGGCACAGGGCGGG
GCCCACCTGAAGCAGTGTGACCTGCTGAAGCTGTCCCGGCGGCAGAAGCAGCTCTGCCGGAGGGAGCCCG
GCCTGGCTGAGACCCTGAGGGATGCTGCGCACCTCGGCCTGCTTGAGTGCCAGTTTCAGTTCCGGCATGA
GCGCTGGAACTGTAGCCTGGAGGGCAGGATGGGCCTGCTCAAGAGAGGCTTCAAAGAGACAGCTTTCCTG
TACGCGGTGTCCTCTGCCGCCCTCACCCACACCCTGGCCCGGGCCTGCAGCGCTGGGCGCATGGAGCGCT
GCACCTGTGATGACTCTCCGGGGCTGGAGAGCCGGCAGGCCTGGCAGTGGGGCGTGTGCGGTGACAACCT
CAAGTACAGCACCAAGTTTCTGAGCAACTTCCTGGGGTCCAAGAGAGGAAACAAGGACCTGCGGGCACGG
GCAGAGGCCCACAATACCCACGTGGGCATCAAGGCTGTGAAGAGTGGCCTCAGGACCACGTGTAAGTGCC
ATGGCGTATCAGGCTCCTGTGCCGTGCGCACCTGCTGGAAGCAGCTCTCCCCGTTCCGTGAGACGGGCCA
GGTGCTGAAACTGCGCTATGACTCGGCTGTCAAGGTGTCCAGTGCCACCAATGAGGCCTTGGGCCGCCTA
GAGCTGTGGGCCCCTGCCAGGCAGGGCAGCCTCACCAAAGGCCTGGCCCCAAGGTCTGGGGACCTGGTGT
ACATGGAGGACTCACCCAGCTTCTGCCGGCCCAGCAAGTACTCACCTGGCACAGCAGGTAGGGTGTGCTC
CCGGGAGGCCAGCTGCAGCAGCCTGTGCTGCGGGCGGGGCTATGACACCCAGAGCCGCCTGGTGGCCTTC
TCCTGCCACTGCCAGGTGCAGTGGTGCTGCTACGTGGAGTGCCAGCAATGTGTGCAGGAGGAGCTTGTGT
ACACCTGCAAGCACTAGGCCTACTGCCCAGCAAGCCAGTC

[0194] The disclosed NOV7 nucleic acid sequence, located on chromosome 17, has 688 of 1009 bases (68%) identical to a gb:GENBANK-ID:AF031168|acc:AF031168.1 mRNA from Gallus gallus (Gallus gallus Wnt-14 protein (Wnt-14) mRNA, complete cds) (E=3.0e⁻⁷⁶).

[0195] A disclosed NOV7 polypeptide (SEQ ID NO: 20) encoded by SEQ ID NO: 19 is 331 amino acid residues and is presented using the one-letter amino acid code in Table 7B. Signal P, Psort and/or Hydropathy results predict that NOV7 contains no signal peptide and is likely to be localized in the cytoplasm with a certainty of 0.4500. In other embodiments, NOV7 is also likely to be localized to the microbody (peroxisome) with a certainty of 0.3000, the mtochondrial matrix space with a certainty of 0.1000, or to the lysosome (lumen) with a certainty of 0.1000.

TABLE 7B
Encoded NOV7 protein sequence.

(SEQ ID NO:20)

LTGREVLTPFPGLGTAAAPAQGGAHLKQCDLLKLSRRQKQLCRREPGLAE
TLRDAAHLGLLECQFQFRHERWNCSLEGRMGLLKRGFKETAFLYAVSSAA
LTHTLARACSAGRMERCTCDDSPGLESRQAWQWGVCGDNLKYSTKFLSNF
LGSKRGNKDLRARADAHNTHVGIKAVKSGLRTTCKCHGVSGSCAVRTCWK
QLSPFRETGQVLKLRYDSAVKVSSATNEALGRLELWAPARQGSLTKGLAP
RSGDLVYMEDSPSFCRPSKYSPGTAGRVCSREASCSSLCCGRGYDTQSRL
VAFSCHCQVQWCCYVECQQCVQEELVYTCKH

[0196] The disclosed NOV7 amino acid sequence has 205 of 330 amino acid residues (62%) identical to, and 252 of 330 amino acid residues (76%) similar to, the 354 amino acid residue ptnr:SWISSPROT-ACC:042280 protein from Gallus gallus (Chicken) (WNT-14 Protein Precursor) (E=1.3e⁻¹¹⁴).

[0197] The tissue expression of NOV7 is predicted to be expressed in brain because of the expression pattern of (GENBANK-ID: gb:GENBANK-ID:AF031168|acc:AF031168.1) a closely related Gallus gallus Wnt-14 protein (Wnt-14) mRNA, complete cds homolog.

[0198] NOV7 also has homology to the amino acid sequences shown in the BLASTP data listed in Table 7C.

TABLE 7C
BLAST results for NOV7

| Gene Index/ | | Length | Identity | Positives | |
|---|---|---|---|---|---|
| Identifier | Protein/Organism | (aa) | (%) | (%) | Expect |
| gi\|16303264\|dbj\|BAB70499.1\| | WNT14B [Homo | 357 | 330/331 | 330/331 | e−175 |
| (AB063483) | sapiens] | | (99%) | (99%) | |
| gi\|3915306\|sp\|O42280\| | WNT-14 PROTEIN | 354 | 204/332 | 253/332 | e−109 |
| WN14_CHICK | PRECURSOR | | (61%) | (75%) | |
| gi\|15082261\|ref\|NP_{—} | wingless-type | 365 | 209/335 | 255/335 | e−108 |
| 003386.1\| | MMTV integration | | (62%) | (75%) | |
| (NM_003395) | site family, | | | | |
| | member 14 [Homo | | | | |
| | sapiens] | | | | |
| gi\|139748\|sp\|P10108\| | WNT-1 PROTEIN | 371 | 120/313 | 175/313 | 5e−58 |
| WNT1_XENLA | PRECURSOR (XWNT- | | (38%) | (55%) | |
| | 1) (XINT-1) | | | | |
| gi\|3024851\|sp\|O14905\| | WNT-15 PROTEIN | 120 | 120/120 | 120/120 | 2e−56 |
| WN15_HUMAN | | | (100%) | (100%) | |

[0199] The homology of these sequences is shown graphically in the ClustalW analysis shown in Table 7D.

[image]

[image]

[0200] Tables 7E and 7F list the domain descriptions from DOMAIN analysis results against NOV7. This indicates that the NOV7 sequence has properties similar to those of other proteins known to contain this domain.

TABLE 7E
Domain Analysis of NOV7

gnl|Pfam|pfam00110, writ, writ family. (SEQ ID NO:l04)
GD-Length = 313 residues, 97.8% aligned
Score = 268 bits (684), Expect = 5e−73

| | | | |
|---|---|---|---|
| NOV 6: | 34 | LSRRQKQLCRREPGLAETLRDAAHLGLLECQFQFRHERWNCSLEGRMGL-----LKRGFK | 88 |
| | | \|\| \|\|+\|\|\|\|\| \| + ++ + \| \| + \|\|\| \|\|\| \|\|\|\|\| \|+ + \|\|+\| + | |
| Sbjct: | 8 | LSPRQRQLCRRNPDVMASVSEGAQLAIQECQHQFRGRRWNCSTLDRLRVVFGKVLKKGTR | 67 |
| NOV 6: | 89 | ETAFLYAVSSAALTHTLARACSAGRMERCTCDDSPG-LESRQAWQWGVCGDNLKYSTKFL | 147 |
| | | \|\|\|\|+\|\|+\|\|\| + \| + \|\|\|\| \| +\| \| \|\| \| + +\|\|\|\| \| \|\|+++ +\| | |
| Sbjct: | 68 | ETAFVYAISSAGVAHAVTRACSEGELESCGCDYKKGPGGPQGSWQWGGCSDNVEFGIRFS | 127 |
| NOV 6: | 148 | SNFLGSKRGNKDLRARADAHNTHVGIKAVKSGLRTTCKCHGVSGSCAVRTCWKQLSPFRE | 207 |
| | | \|+ ++ +\| \|+ + \|\| \| \|\|\|\|\| +\| \|\|\|\|\|\|\|\|\|\|+++\|\|\| \| \|\| | |
| Sbjct: | 128 | REFVDARERERDARSLNNLHNNEAGRKAVKSHMRRECKCHGVSGSCSMKTCWLSLPDFRA | 187 |
| NOV 6: | 208 | TGQVLKLRYDSAVKVSSATNEALGRLELWAPARQGSLTKGLAPRSGDLVYMEDSPSFCR- | 266 |
| | | \| \|\| +\|\| \|++\| \| + \|\| + \| \|\|\|\|+\|\|\|\| +\| | |
| Sbjct: | 188 | VGDALKDKYDGAIRV---EPNKRGMGQGSAPRLVAKNPRFKPPTRSDLVYLEDSPDYCER | 244 |
| NOV 6: | 267 | -PSKYSPGTAGRVCSREA----SCSSLCCGRGYDTQSRLVAFSCHCQVQWCCYVECQQCV | 321 |
| | | \| \| \|\| \|\|\|\|++ + \| \|\|\|\|\|\|\|+\|\| \|+\|+ \|\|\|\|\|+\|++\| | |
| Sbjct: | 245 | DRSTGSLGTQGRVCNKTSKGLDGCELLCCGRGYNTQQVERTEKCNCKFHWCCYVKCEECQ | 304 |
| NOV 6: | 322 | QEELVYTCK 330 | |
| | | + \|+\|\|\| | |
| Sbjct: | 305 | EVVEVHTCK 313 | |

[0201] TABLE 7F
Domain Analysis of NOV7

gnl|Smart|smart00097, WNT1, found in Wnt-1 (SEQ ID NO:105)
CD-Length = 304 residues, 98.7% aligned
Score = 248 bits (632), Expect = Se−67

| | | | |
|---|---|---|---|
| NOV 6: | 34 | LSRRQKQLCRREPGLAETLRDAAHLGLLECQFQFRHERWNCSLEGRMGL----LKRGFKE | 89 |
| | | \|\|\|\|\|+\|\|\|\| \| + ++ + \| \|+ \|\|\| \|\|\| \|\|\|\|\| \| + \|++\| +\| | |
| Sbjct: | 5 | LSRRQRQLCRANPDVMASVAEGAQEGIEECQHQFRFRRWNCSTAGLASIFGKVLRQGTRE | 64 |
| NOV 6: | 90 | TAFLYAVSSAALTHTLARACSAGRMERCTCDDSPGLESRQAWQWGVCGDNLKYSTKFLSN | 149 |
| | | \|\|\|+\|\|+\|\|\| + \| + \|\|\|\| \| ++ \| \|\| \| + \|+\|\| \| \|\|+ + \| | |
| Sbjct: | 65 | TAFVYAISSAGVAHAVTRACSQGELDSCGCDYSKRGSGGRGWEWGGCSDNIDFGIGFSFR | 124 |
| NOV 6: | 150 | FLGSK-RGNKDLRARADAHNTHVGIKAVKSGLRTTCKCHGVSGSCAVRTCWKQLSPFRET | 208 |
| | | \|+ ++ \| \| \|\| + \|\| \| \|\|\| ++ \|\|\|\|\|\|\|\|\|\|+\|+\|\|\| \|\| \|\|\| | |
| Sbjct: | 125 | FVDARERRGSDARALMNLHNNEAGRLAVKKTMKRECKCHGVSGSCSVKTCWLQLPEFREI | 184 |
| NOV 6: | 209 | GQVLKLRYDSAVKVSSATNEALGRLELWAPARQGSLTKGLAPRSGDLVYMEDSPSFC--R | 266 |
| | | \| \|\| +\|\| \| +\| \| + \| + \|\|\|\|+\| \|\| \|\| | |
| Sbjct: | 185 | GDYLKEKYDGASEV-VLDKRGTRGLVPANRDFK-------PPTNTDLVYLESSPDFCEKN | 236 |
| NOV 6: | 267 | PSKYSPGTAGRVCSREA----SCSSLCCGRGYDTQSRLVAFSCHQWCCYVECQQCVQ | 322 |
| | | \| \| \|\| \|\|\|\|++ + \| \|\|\|\|\|\|\|+\|+ \| \|+\|+ \|\|\|\|\|+\|+\|\| + | |
| Sbjct: | 237 | PKTGSLGTQGRVCNKTSKGLDGCDLLCCGRGYNTEHVEVVERCNCKFHWCCYVKCKQCRE | 296 |
| NOV 6: | 323 | EELVYTCK 330 | |
| | | +\|\|\| | |
| Sbjct: | 297 | RVEKHTCK 304 | |

[0202] Wnt proteins constitute a large family of molecules involved in cell proliferation, cell differentiation and embryonic patterning. They are known to interact with the Frizzled family of receptors to activate two main intracellular signaling pathways regulating intracellular calcium levels and gene transcription. Early studies on Wnts implicated them in cell proliferation and tumorigenesis, which have been borne out by recent work using transgenic and null mutant mice. Wnts are involved in processes involved in mammary gland development and cancer. Recent studies have demonstrated that these molecules are critical to organogenesis of several systems, such as the kidney and brain. Wnts regulate the early development, i.e. neural induction, and their role persists in later stages of development as well as in the mature organ. An example of this is seen in the brain, where the loss of certain Wnts leads to the absence of critical regions of the brain, e.g. the hippocampus, involved in learning and memory, or the cerebellum, involved in motor function. Wnts have also been implicated in the genesis of degenerative diseases such as Alzheimer's disease. The protein encoded by the novel gene described herein may therefore play a role in cellular proliferation, differentiation, dysregulation, organogenesis and disease processes such as cancer, developmental defects etc.

[0203] A partial sequence corresponding to this novel protein, with homology to the chicken Wnt-14, has been deposited in GenBank with the nomenclature Wnt-15.

[0204] Alzheimer's disease (AD) is a neurodegenerative disease with progressive dementia accompanied by three main structural changes in the brain: diffuse loss of neurons; intracellular protein deposits termed neurofibrillary tangles (NFT) and extracellular protein deposits termed amyloid or senile plaques, surrounded by dystrophic neurites. Two major hypotheses have been proposed in order to explain the molecular hallmarks of the disease: The ‘amyloid cascade’ hypothesis and the ‘neuronal cytoskeletal degeneration’ hypothesis. While the former is supported by genetic studies of the early-onset familial forms of AD (FAD), the latter revolves around the observation in vivo that cytoskeletal changes—including the abnormal phosphorylation state of the microtubule associated protein tau—may precede the deposition of senile plaques. Recent studies have suggested that the trafficking process of membrane associated proteins is modulated by the FAD-linked presenilin (PS) proteins, and that amyloid beta-peptide deposition may be initiated intracellularly, through the secretory pathway. Current hypotheses concerning presenilin function are based upon its cellular localization and its putative interaction as macromolecular complexes with the cell- adhesion/signaling beta-catenin molecule and the glycogen synthase kinase 3beta (GSK-3beta) enzyme. Developmental studies have shown that PS proteins function as components in the Notch signal transduction cascade and that beta-catenin and GSK-3beta are transducers of the Wnt signaling pathway. Both pathways are thought to have an important role in brain development, and they have been connected through Dishevelled (Dvl) protein, a known transducer of the Wnt pathway.

[0205] Members of the vertebrate Wnt family have been subdivided into two functional classes according to their biological activities. Some Wnts signal through the canonical Wnt-1/wingless pathway by stabilizing cytoplasmic beta-catenin. By contrast other Wnts stimulate intracellular Ca2+ release and activate two kinases, CamKII and PKC, in a G-protein-dependent manner. Moreover, putative Wnt receptors belonging to the Frizzled gene family have been identified that preferentially couple to the two prospective pathways in the absence of ectopic Wnt ligand and that might account for the signaling specificity of the Wnt pathways. As Ca2+ release was the first described feature of the noncanonical pathway, and as Ca2+ probably plays a key role in the activation of CamKII and PKC, Kuhl M, et al., (Trends Genet July 2000 ;16(7):279-83) have named this Wnt pathway the Wnt/Ca2+ pathway.

[0206] Many constituents of Wnt signaling pathways are expressed in the developing and mature nervous systems. Recent work has shown that Wnt signaling controls initial formation of the neural plate and many subsequent patterning decisions in the embryonic nervous system, including formation of the neural crest. Wnt signaling continues to be important at later stages of development. Wnts have been shown to regulate the anatomy of the neuronal cytoskeleton and the differentiation of synapses in the cerebellum. Wnt signaling has been demonstrated to regulate apoptosis and may participate in degenerative processes leading to cell death in the aging brain.

[0207] Recent genetic studies have shown that the signalling factor Wnt3a is required for formation of the hippocampus; the developmental consequences of Wnt signalling in the hippocampus are mediated by multiple HMG-box transcription factors, with LEF-1 being required just for formation of the dentate gyrus.

[0208] Wnt-1 was first identified as a protooncogene activated by viral insertion in mouse mammary tumors. Transgenic expression of this gene using a mouse mammary tumor virus LTR enhancer causes extensive ductal hyperplasia early in life and mammary adenocarcinomas in approximately 50% of the female transgenic (TG) mice by 6 months of age. Metastasis to the lung and proximal lymph nodes is rare at the time tumors are detected but frequent after the removal of the primary neoplasm. The potent mitogenic effect mediated by Wnt-1 expression does not require estrogen stimulation; tumors form after an increased latency in estrogen receptor alpha-null mice. Several genetic lesions, including inactivation of p53 and over-expression of Fgf-3, collaborate with Wnt-1 in leading to mammary tumors, but loss of Sky and inactivation of one allele of Rb do not affect the rate of tumor formation in Wnt-1 TG mice.

[0209] Communication between cells is often mediated by secreted signaling molecules that bind cell surface receptors and modulate the activity of specific intracellular effectors. The Wnt family of secreted glycoproteins is one group of signaling molecules that has been shown to control a variety of developmental processes including cell fate specification, cell proliferation, cell polarity and cell migration. In addition, mis-regulation of Wnt signaling can cause developmental defects and is implicated in the genesis of several human cancers. The importance of Wnt signaling in development and in clinical pathologies is underscored by the large number of primary research papers examining various aspects of Wnt signaling that have been published in the past several years.

[0210] Reproductive tract development and function is regulated by circulating steroid hormones. In the mammalian female reproductive tract, estrogenic compounds direct many aspects of cytodifferentiation including uterine gland formation, smooth muscle morphology, and epithelial differentiation. While it is clear that these hormones act through their cognate nuclear receptors, it is less clear what signaling events follow hormonal stimulation that govern cytodifferentiation. Recent advances in molecular embryology and cancer cell biology have identified the Wnt family of secreted signaling molecules. Discussed here are recent advances that point to a definitive role during uterine development and adult function for one member of the Wnt gene family, Wnt-7a. In addition, recent data is reviewed that implicates Wnt-7a deregulation in response to pre-natal exposure to the synthetic estrogenic compound, DES. These advances point to an important role for the Wnt gene family in various reproductive tract pathologies including cancer.

[0211] Holoprosencephaly (HPE) is the most common developmental defect of the forebrain in humans. Several distinct human genes for holoprosencephaly have now been identified. They include Sonic hedgehog (SHH), ZIC2, and SIX3. Many additional genes involved in forebrain development are rapidly being cloned and characterized in model vertebrate organisms. These include Patched (Ptc), Smoothened (Smo), cubitus interuptus (ci)/Gli, wingless (wg/Wnt, decapentaplegic (dpp)/BMP, Hedgehog interacting protein (Hip), nodal, Smads, One-eyed pinhead (Oep), and TG-Interacting Factor (TGIF). However, further analysis is needed before their roles in HPE can be established.

[0212] Female reproductive hormones control mammary gland morphogenesis. In the absence of the progesterone receptor (PR) from the mammary epithelium, ductal side-branching fails to occur. Brisken C, et al. (Genes Dev March 2000 15;14(6):650-4) overcame this defect by ectopic expression of the protooncogene Wnt-1. Transplantation of mammary epithelia from Wnt-4(−)/(−) mice shows that Wnt-4 has an essential role in side-branching early in pregnancy. PR and Wnt-4 mRNAs colocalize to the luminal compartment of the ductal epithelium. Progesterone induces Wnt-4 in mammary epithelial cells and is required for increased Wnt-4 expression during pregnancy. Thus, Wnt signaling is essential in mediating progesterone function during mammary gland morphogenesis.

[0213] Synapse formation requires changes in cell morphology and the upregulation and localization of synaptic proteins. In the cerebellum, mossy fibers undergo extensive remodeling as they contact several granule cells and form complex, multisynaptic glomerular rosettes. Hall A C, et al., (Cell March 2000 3;100(5):525-35) showed that granule cells secrete factors that induce axon and growth cone remodeling in mossy fibers. This effect is blocked by the WNT antagonist, sFRP-1, and mimicked by WNT-7a, which is expressed by granule cells. WNT-7a also induces synapsin I clustering at remodeled areas of mossy fibers, a preliminary step in synaptogenesis. Wnt-7a mutant mice show a delay in the morphological maturation of glomerular rosettes and in the accumulation of synapsin I. We propose that WNT-7a can function as a synaptogenic factor.

[0214] Estrogens have important functions in mammary gland development and carcinogenesis. To better define these roles, Bocchinfuso W P, et al., (Cancer Res April 1999 15;59(8):1869-76) have used two previously characterized lines of genetically altered mice: estrogen receptor-alpha (ER alpha) knockout (ERKO) mice, which lack the gene encoding ER alpha, and mouse mammary virus tumor (MMTV)-Wnt-1 transgenic mice (Wnt-1 TG), which develop mammary hyperplasia and neoplasia due to ectopic production of the Wnt-1 secretory glycoprotein. Bocchinfuso W P, et al. have crossed these lines to ascertain the effects of ER alpha deficiency on mammary gland development and carcinogenesis in mice expressing the Wnt-1 transgene. Introduction of the Wnt-1 transgene into the ERKO background stimulates proliferation of alveolar-like epithelium, indicating that Wnt-1 protein can promote mitogenesis in the absence of an ER alpha-mediated response. The hyperplastic glandular tissue remains confined to the nipple region, implying that the requirement for ER alpha in ductal expansion is not overcome by ectopic Wnt-1. Tumors were detected in virgin ERKO females expressing the Wnt-1 transgene at an average age (48 weeks) that is twice that seen in virgin Wnt-1 TG mice (24 weeks) competent to produce ER alpha. Prepubertal ovariectomy of Wnt-1 TG mice also extended tumor latency to 42 weeks. However, pregnancy did not appear to accelerate the appearance of tumors in Wnt-1 TG mice, and tumor growth rates were not measurably affected by late ovariectomy. Small hyperplastic mammary glands were observed in Wnt-1 TG males, regardless of ER alpha gene status; the glands were similar in appearance to those found in ERKO/Wnt-1 TG females. Mammary tumors also occurred in Wnt-1 TG males; latency tended to be longer in the heterozygous ER alpha and ERKO males (86 to 100 weeks) than in wild-type ER alpha mice (ca. 75 weeks). Bocchinfuso W P, et al. concluded that ectopic expression of the Wnt-1 proto-oncogene can induce mammary hyperplasia and tumorigenesis in the absence of ER alpha in female and male mice. The delayed time of tumor appearance may depend on the number of cells at risk of secondary events in the hyperplastic glands, on the carcinogenesis-promoting effects of ER alpha signaling, or on both.

[0215] Wnt-1 and Wnt-3a proto-oncogenes have been implicated in the development of midbrain and hindbrain structures. Evidence for such a role has been derived from in situ hybridization studies showing Wnt-1 and -3a expression in developing cranial and spinal cord regions and from studies of mutant mice whose Wnt-1 genes have undergone targeted disruption by homologous recombination. Wnt-1 null mutants exhibit cranial defects but no spinal cord abnormalities, despite expression of the gene in these regions. The absence of spinal cord abnormalities is thought to be due to a functional compensation of the Wnt-1 deficiency by related genes, a problem that has complicated the analysis of null mutants of other developmental genes as well. Augustine K, et al., (Dev Genet 1993;14(6):500-20) describe the attenuation of Wnt-1 expression using antisense oligonucleotide inhibition in mouse embryos grown in culture. Augustine K, et al. induced similar mid-and hindbrain abnormalities as those seen in the Wnt-1 null mutant mice. Attenuation of Wnt-1 expression was also associated with cardiomegaly resulting in hemostasis. These findings are consistent with the possibility that a subset of Wnt-1 expressing cells include neural crest cells known to contribute to septation of the truncus arteriosus and to formation of the visceral arches. Antisense knockout of Wnt-3a, a gene structurally related to Wnt-1, targeted the forebrain and midbrain region, which were hypoplastic and failed to expand, and the spinal cord, which exhibited lateral outpocketings at the level of the forelimb buds. Dual antisense knockouts of Wnt-1 and Wnt-3a targeted all brain regions leading to incomplete closure of the cranial neural folds, and an increase in the number and severity of outpocketings along the spinal cord, suggesting that these genes complement one another to produce normal patterning of the spinal cord. The short time required to assess the mutant phenotype (2 days) and the need for limited sequence information of the target gene (20-25 nucleotides) make this antisense oligonucleotide/whole embryo culture system ideal for testing the importance of specific genes and their interactions in murine embryonic development.

[0216] Wnt-1 (previously known as int-1) is a proto-oncogene induced by the integration of the mouse mammary tumor virus. It is thought to play a role in intercellular communication and seems to be a signalling molecule important in the development of the central nervous system (CNS). The sequence of wnt-1 is highly conserved in mammals, fish, and amphibians. Wnt-1 is a member of a large family of related proteins that are all thought to be developmental regulators. These proteins are known as wnt-2 (also known as irp), wnt-3 up to wnt-15. At least four members of this family are present in Drosophila. One of them, wingless (wg), is implicated in segmentation polarity. All these proteins share the following features characteristics of secretory proteins, a signal peptide, several potential N-glycosylation sites and 22 conserved cysteines that are probably involved in disulfide bonds. The Wnt proteins seem to adhere to the plasma membrane of the secreting cells and are therefore likely tosignal over only few cell diameters.

[0217] The disclosed NOV7 nucleic acid of the invention encoding a Wnt-15-like protein includes the nucleic acid whose sequence is provided in Table 7A or a fragment thereof. The invention also includes a mutant or variant nucleic acid any of whose bases may be changed from the corresponding base shown in Table 7A while still encoding a protein that maintains its Wnt-15-like activities and physiological functions, or a fragment of such a nucleic acid. The invention further includes nucleic acids whose sequences are complementary to those just described, including nucleic acid fragments that are complementary to any of the nucleic acids just described. The invention additionally includes nucleic acids or nucleic acid fragments, or complements thereto, whose structures include chemical modifications. Such modifications include, by way of nonlimiting example, modified bases, and nucleic acids whose sugar phosphate backbones are modified or derivatized. These modifications are carried out at least in part to enhance the chemical stability of the modified nucleic acid, such that they may be used, for example, as antisense binding nucleic acids in therapeutic applications in a subject. In the mutant or variant nucleic acids, and their complements, up to about 32 percent of the bases may be so changed.

[0218] The disclosed NOV7 protein of the invention includes the Wnt-15-like protein whose sequence is provided in Table 7B. The invention also includes a mutant or variant protein any of whose residues may be changed from the corresponding residue shown in Table 7B while still encoding a protein that maintains its Wnt-15-like activities and physiological functions, or a functional fragment thereof. In the mutant or variant protein, up to about 38 percent of the residues may be so changed.

[0219] The above defined information for this invention suggests that these Wnt-15-like proteins (NOV7) may function as a member of a “Wnt-15 family”. Therefore, the NOV7 nucleic acids and proteins identified here may be useful in potential therapeutic applications implicated in (but not limited to) various pathologies and disorders as indicated below. The potential therapeutic applications for this invention include, but are not limited to: protein therapeutic, small molecule drug target, antibody target (therapeutic, diagnostic, drug targeting/cytotoxic antibody), diagnostic and/or prognostic marker, gene therapy (gene delivery/gene ablation), research tools, tissue regeneration in vivo and in vitro of all tissues and cell types composing (but not limited to) those defined here.

[0220] The nucleic acids and proteins of NOV7 are useful in Von Hippel-Lindau (VHL) syndrome, Alzheimer's disease, stroke, tuberous sclerosis, hypercalceimia, Parkinson's disease, Huntington's disease, cerebral palsy, epilepsy, Lesch-Nyhan syndrome, multiple sclerosis, ataxia-telangiectasia, leukodystrophies, behavioral disorders, addiction, anxiety, pain, neurodegeneration, cancer, developmental defects, and/or other pathologies and disorders. The novel NOV7 nucleic acid encoding NOV7 protein,, or fragments thereof, may further be useful in diagnostic applications, wherein the presence or amount of the nucleic acid or the protein are to be assessed. These materials are further useful in the generation of antibodies that bind immunospecifically to the novel substances of the invention for use in therapeutic or diagnostic methods.

[0221] NOV7 nucleic acids and polypeptides are further useful in the generation of antibodies that bind immunospecifically to the novel substances of the invention for use in therapeutic or diagnostic methods. These antibodies may be generated according to methods known in the art, using prediction from hydrophobicity charts, as described in the “Anti-NOVX Antibodies” section below. For example the disclosed NOV7 protein have multiple hydrophilic regions, each of which can be used as an immunogen. In one embodiment, contemplated NOV7 epitope is from about amino acids 25 to 60. In other embodiments, NOV7 epitope is from about amino acids 65 to 80, from about amino acids 110 to 140, from about amino acids 145 to 180, from about amino acids 190 to 220, from about amino acids 230 to 270, or from about amino acids 280 to 290. This novel protein also has value in development of powerful assay system for functional analysis of various human disorders, which will help in understanding of pathology of the disease and development of new drug targets for various disorders.

[0222] NOV8

[0223] A disclosed NOV8 nucleic acid of 1085 nucleotides (also referred to 88091010_EXT) encoding a novel Wnt-14-like protein is shown in Table 8A. An open reading frame was identified beginning with an ATG initiation codon at nucleotides 13-15 and ending with a TGA codon at nucleotides 1078-1080. In Table 8A, the 5′ and 3′ untranslated regions are underlined and the start and stop codons are in bold letters.

TABLE 8A
NOV8 Nucleotide Sequence

(SEQ ID NO:21)

TAGTGAGCCGAGATGGCACTACTATATTCCAGCTTGGGTGTGGTTGTGTGCACCTGTAGTCCTAGTTACTT
TGGACTGACGGGCAGCGAGCCCCTGACCATCCTCCCGCTGACCCTGGAGCCAGAGGCGGCTGCCCAGGCGC
ACTACAAGGCCTGCGACCGGCTGAAGCTGGAGCGGAAGCAGCGGCGCATGTGCCGCCGGGACCCGGGCGTG
GCAGAGACGCTGGTGGAGGCCGTGAGCATGAGTGCGCTCGAGTGCCAGTTCCAGTTCCGCTTTGAGCGCTG
GAACTGCACGCTGGAGGGCCGCTACCGGGCCAGCCTGCTCAAGCGAGGTTTCAAGGAGACTGCCTTCCTCT
ATGCCATCTCCTCGGCTGGCCTGACGCACGCACTGGCCAAGGCGTGCAGCGCGGGCCGCATGGAGCGCTGT
ACCTGCGATGAGGCACCCGACCTGGAGAACCGTGAGGGCTGGAAGTGGGGTGGCTGTAGCGAGGACATCGA
GTTTGGTGGGATGGTGTCTCGGGAGTTCGCCGACGCCCGGGAGAACCGGCCAGATGCCCGCTCAGCCATGA
ACCGCCACAACAACGAGGCTGGGCGCCAGGTGATCAAGGCTGGGGTGGAGACCACCTGCAAGTGCCACGGC
GTGTCAGGCTCATGCACGGTGCGGACCTGCTGGCGGCAGTTGGCGCCTTTCCATGAGGTGGGCAAGCATCT
GAAGCACAAGTATGAGTCGGCACTCAAGGTGGGCAGCACCACCAATGAAGCTGCCGGCGAGGCAGGTGCCA
TCTCCCCACCACGGGGCCGTGCCTCGGGGGCAGGTGGCAGCGACCCGCTGCCCCGCACTCCAGAGCTGGTG
CCGTGAGAAGAACTGCGAGAGCATCTGCTGTGGCCGCGGCCATAACACACAGAGCCGGGTGGTGACAAGGC
CCTGCCAGTGCCAGGTGCGTTGGTGCTGCTATGTGGAGTGCAGGCAGTGCACGCAGCGTGAGGAGGTCTAC
ACCTGCAAGGGCTGAGTTCC

[0224] The disclosed NOV8 nucleic acid sequence, localized to chromosome 1, has 560 of 725 bases (77%) identical to a gb:GENBANK-ID:AF031168|acc:AF031168.1 mRNA from Gallus gallus (Gallus gallus Wnt-14 protein (Wnt-14) mRNA, complete cds (E=5.2e⁻¹¹⁵)

[0225] A disclosed NOV8 polypeptide (SEQ ID NO: 22) encoded by SEQ ID NO: 21 is 355 amino acid residues and is presented using the one-letter amino acid code in Table 8B. Signal P, Psort and/or Hydropathy results predict that NOV8 has a signal peptide and is likely to be localized extracellularly with a certainty of 0.3700. In other embodiments, NOV8 is also likely to be localized to the enoplasmic reticulum (membrane) with a certainty of 0.1000, to the endoplasmic reticulum (lumen) with a certainty of 0.1000, or the lysosome (lumen) with a certainty of 0.1000. The most likely cleavage site for a NOV8 peptide is between amino acids 15 and 16, at: CTC-SP.

TABLE 8B
Encoded NOV8 protein sequence.

(SEQ ID NO:22)

MALLYSSLGVVVCTCSPSYFGLTGSEPLTILPLTLEPEAAAQAHYKACDR
LKLERKQRRMCRRDPGVAETLVEAVSMSALECQFQFRFERWNCTLEGRYR
ASLLKRGFKETAFLYAISSAGLTHALAKACSAGRMERCTCDEAPDLENRE
GWKWGGCSEDIEFGGMVSREFADARENRPDARSAMNRHNNEAGRQVIKAG
VETTCKCHGVSGSCTVRTCWRQLAPFHEVGKHLKHKYESALKVGSTTNEA
AGEAGAISPPRGRASGAGGSDPLPRTPELVHLDDSPSFCLAGRFSPGTAG
RRCHREKNCESICCGRGHNTQSRVVTRPCQCQVRWCCYVECRQCTQREEV
YTCKG

[0226] The disclosed NOV8 amino acid sequence has 270 of 354 amino acid residues (76%) identical to, and 310 of 354 amino acid residues (87%) similar to, the 354 amino acid residue ptnr:SWISSPROT-ACC:042280 protein from Gallus gallus (Chicken) (WNT-14 Protein Precursor (1.2e⁻¹⁵¹).

[0227] NOV8 is expressed in at least brain. This information was derived by determining the tissue sources of the sequences that were included in the invention including but not limited to SeqCalling sources, Public EST sources, Literature sources, and/or RACE sources.

[0228] In addition, the sequence is predicted to be expressed in brain because of the expression pattern of (GENBANK-ID: gb:GENBANK-ID:AF031168|acc:AF031168.1) a closely related [Gallus gallus Wnt-14 protein (Wnt-14) mRNA, complete cds].

[0229] NOV8 also has homology to the amino acid sequence shown in the BLASTP data listed in Table 8C.

TABLE 8C
BLAST results for NOV8

| Gene Index/ | | Length | Identity | Positives | |
|---|---|---|---|---|---|
| Identifier | Protein/Organism | (aa) | (%) | (%) | Expect |
| gi\|15082261\|ref\|NP_{—} | wingless-type | 365 | 306/340 | 321/340 | e−167 |
| 003386.1\| | MMTV integration | | (90%) | (94%) | |
| (NM_003395) | site family, | | | | |
| | member 14 [Homo | | | | |
| | sapiens] | | | | |
| gi\|3915306\|sp\|O42280 | WNT-14 PROTEIN | 354 | 270/357 | 310/357 | e−142 |
| \|WN14_CHICK | PRECURSOR | | (75%) | (86%) | |
| gi\|16303264\|dbj\| | WNT14B [Homo | 357 | 193/339 | 244/339 | e−100 |
| BAB70499.1\| | sapiens] | | (56%) | (71%) | |
| (AB063483) | | | | | |
| gi\|7106447\|ref\|NP_{—} | wingless-related | 352 | 141/311 | 179/311 | 2e−62 |
| 033548.1\| (NM_{—} | MMTV integration | | (45%) | (57%) | |
| 009522) | site 3A [Mus | | | | |
| | musculus] | | | | |
| gi\|5821261\|dbj\| | Wnt-3a [Gallus | 376 | 139/311 | 179/311 | 3e−62 |
| BAA83743.1\| | gallus] | | (44%) | (56%) | |
| (AB024080) | | | | | |

[0230] The homology of these sequences is shown graphically in the ClustalW analysis shown in Table 8D.

[image]

[image]

[0231] Tables 8E and 8F list the domain descriptions from DOMAIN analysis results against NOV8. This indicates that the NOV8 sequence has properties similar to those of other proteins known to contain this domain.

TABLE 8E
Domain Analysis of NOV8

gnl|Pfam|pfam0010, wnt, wnt family. (SEQ ID NO:104)
CD-Length = 313 residues, 99.7% aligned
Score = 313 bits (801), Expect = le−86

| | | | |
|---|---|---|---|
| NOV 7: | 48 | CDRLK-LERKQRRMCRRDPGVAETLVEAVSMSALECQFQFRFERWNCTLEGRYRASL--- | 103 |
| | | \| \| \| +\|\|++\|\|\|+\| \| ++ \| ++ \|\|\| \|\|\| \|\|\|\|+ \| \| | |
| Sbjct: | 2 | CRSLPGLSPRQRQLCRRNPDVMASVSEGAQLAIQECQHQFRGRRWNCSTLDRLRVVFGKV | 61 |
| NOV 7: | 104 | LKRGFKETAFLYAISSAGLTHALAKACSAGRMERCTCDE-APDLENREGWKWGGCSEDIE | 162 |
| | | \|\|+\| +\|\|\|\|+\|\|\|\|\|\|\|+ \|\|+ +\|\|\| \| +\| \| \|\| + \|+\|\|\|\|\|+++\| | |
| Sbjct: | 62 | LKKGTRETAFVYAISSAGVAHAVTRACSEGELESCGCDYKKGPGGPQGSWQWGGCSDNVE | 121 |
| NOV 7: | 163 | FGGMVSREFADARENRPDARSAMNRHNNEAGRQVIKAGVETTCKCHGVSGSCTVRTCWRQ | 222 |
| | | \|\| \|\|\|\| \|\|\|\| \|\|\|\| \|\| \|\|\|\|\|\|\|+ +\|+ + \|\|\|\|\|\|\|\|\|\|+++\|\|\| | |
| Sbjct: | 122 | FGIRFSREFVDARERERDARSLMNLHNNEAGRKAVKSHMRRECKCHGVSGSCSMKTCWLS | 181 |
| NOV 7: | 223 | LAPFHEVGKHLKHKYESALKV-GSTTNEAAGEAGAISPPRCRASOAGGSDPLPRTPELVH | 281 |
| | | \| \| \|\| \|\| \|\|+ \|++\| + \| \| + \| \|\| \|\|+ | |
| Sbjct: | 182 | LPDFRAVGDALKDKYDGAIRVEPNKRGMGQGSAPRLVAKNPRFKPPTRSD-------LVY | 234 |
| NOV 7: | 282 | LDDSPSFCL--AGRFSPGTAGRRC----HREKNCESICCGRGHNTQSRVVTRPCQCQVRW | 335 |
| | | \|+\|\|\| +\| \| \|\| \|\| \| \|\| +\|\|\|\|\|+\|\|\| \| \| \|+ \| | |
| Shjct: | 235 | LEDSPDYCERDRSTGSLGTQGRVCNKTSKGLDGCELLCCGRGYNTQQVERTEKCNCKFHW | 294 |
| NOV 7: | 336 | CCYVECRQCTQREEVYTCK 354 | |
| | | \|\|\|\|+\| +\| + \|\|+\|\|\| | |
| Sbjct: | 295 | CCYVKCEECQEVVEVHTCK 313 | |

[0232] TABLE 8F
Domain Analysis of NOV8

gnl|Smart|smart00097, WNT1, found in Wnt-1 (SEQ ID NO:105)
CD-Length = 304 residues, 98.7% aligned
Score = 292 bits (748), Expect = 2e−80

| | | | |
|---|---|---|---|
| NOV 7: | 53 | LERKQRRMCRRDPGVAETLVEAVSMSALECQFQFRFERWNCTLEGRYRA--SLLKRGFKE | 110 |
| | | \| \|+\|\|++\|\| +\| \| ++ \| \|\|\| \|\|\|\| \|\|\|\|+ \| +\|++\| +\| | |
| Sbjct: | 5 | LSRRQRQLCRANPDVMASVAEGAQEGIEECQHQFRFRRWNCSTAGLASIFOKVLRQGTRE | 64 |
| NOV 7: | 111 | TAFLYAISSAGLTHALAKACSAGRMERCTCDEAPDLENREGWKWGGCSEDIEFGGMVSRE | 170 |
| | | \|\|\|+\|\|\|\|\|\|\|+ \|\|+ +\|\|\| \| ++ \| \|\| + \|\|+\|\|\|\|\|++\|+\|\| \|\|\| | |
| Sbjct: | 65 | TAFVYAISSAGVAHAVTRACSQGELDSCGCDYSKRGSGGRGWEWGGCSDNIDFGIGFSRE | 124 |
| NOV 7: | 171 | FADARER-PDARSAMNRHNNEAGRQVIKAGVETTCKCHGVSGSCTVRTCWRQLAPFHEV | 229 |
| | | \| \|\|\|\| \| \|\|\|+ \|\| \|\|\|\|\|\| +\| ++ \|\|\|\|\|\|\|\|\|\|+\|+\|\|\| \|\| \| \|+ | |
| Sbjct: | 125 | FVDARERRGSDARALMNLHNNEAGRLAVKKTMXRECKCHOVSGSCSVKTCWLQLPEFREI | 184 |
| NOV 7: | 230 | CKHLRHKYESALKVGSTTNEAAGEAGAISPPRGRASGAGGSDPLPRTPELVHLDDSPSFC | 289 |
| | | \| +\|\| \|\|+ \| +\| \| \| +\|\|+\|+ \|\| \|\| | |
| Sbjct: | 185 | GDYLKEKYDCASEVVLD-----------KRGTRGLVPANRDFKPPTNTDLVYLESSPDFC | 233 |
| NOV 7: | 290 | LAGRF--SPCTAGRRCHREKN----CESICCGRGHNTQSRVVTRPCQCQVRWCCYVECRQ | 343 |
| | | \| \|\| \|\| \|++ \|+ +\|\|\|\|\|+\|\|+ \| \| \|+ \|\|\|\|\|+\|+\| | |
| Sbjct: | 234 | EKNPKTGSLGTQGRVCNKTSKCLDOCDLLCCORGYNTEHVEVVERCNCKFHWCCYVKCKQ | 293 |
| NOV 7: | 344 | CTQREEVYTCK 354 | |
| | | \| +\| \| +\|\|\| | |
| Sbjct: | 294 | CRERVEKHTCK 304 | |

[0233] Wnt proteins constitute a large family of molecules involved in cell proliferation, cell differentiation and embryonic patterning. They are known to interact with the Frizzled family of receptors to activate two main intracellular signaling pathways regulating intracellular calcium levels and gene transcription. Early studies on Wnts implicated them in cell proliferation and tumorigenesis, which have been borne out by recent work using transgenic and null mutant mice. Wnts are involved in processes involved in mammary gland development and cancer. Recent studies have demonstrated that these molecules are critical to organogenesis of several systems, such as the kidney and brain. Wnts regulate the early development, i.e. neural induction, and their role persists in later stages of development as well as in the mature organ. An example of this is seen in the brain, where the loss of certain Wnts leads to the absence of critical regions of the brain, e.g. the hippocampus, involved in learning and memory, or the cerebellum, involved in motor function. Wnts have also been implicated in the genesis of degenerative diseases such as Alzheimer's disease. The protein encoded by the novel gene described herein may therefore play a role in cellular proliferation, differentiation, dysregulation, organogenesis and disease processes such as cancer, developmental defects etc.

[0234] Alzheimer's disease (AD) is a neurodegenerative disease with progressive dementia accompanied by three main structural changes in the brain: diffuse loss of neurons; intracellular protein deposits termed neurofibrillary tangles (NFT) and extracellular protein deposits termed amyloid or senile plaques, surrounded by dystrophic neurites. Two major hypotheses have been proposed in order to explain the molecular hallmarks of the disease: The ‘amyloid cascade’ hypothesis and the ‘neuronal cytoskeletal degeneration’ hypothesis. While the former is supported by genetic studies of the early-onset familial forms of AD (FAD), the latter revolves around the observation in vivo that cytoskeletal changes—including the abnormal phosphorylation state of the microtubule associated protein tau—may precede the deposition of senile plaques. Recent studies have suggested that the trafficking process of membrane associated proteins is modulated by the FAD-linked presenilin (PS) proteins, and that amyloid beta-peptide deposition may be initiated intracellularly, through the secretory pathway. Current hypotheses concerning presenilin function are based upon its cellular localization and its putative interaction as macromolecular complexes with the cell-adhesion/signaling beta-catenin molecule and the glycogen synthase kinase 3beta (GSK-3beta) enzyme. Developmental studies have shown that PS proteins function as components in the Notch signal transduction cascade and that beta-catenin and GSK-3beta are transducers of the Wnt signaling pathway. Both pathways are thought to have an important role in brain development, and they have been connected through Dishevelled (Dvl) protein, a known transducer of the Wnt pathway.

[0235] Members of the vertebrate Wnt family have been subdivided into two functional classes according to their biological activities. Some Wnts signal through the canonical Wnt-1/wingless pathway by stabilizing cytoplasmic beta-catenin. By contrast other Wnts stimulate intracellular Ca2+ release and activate two kinases, CamKII and PKC, in a G-protein-dependent manner. Moreover, putative Wnt receptors belonging to the Frizzled gene family have been identified that preferentially couple to the two prospective pathways in the absence of ectopic Wnt ligand and that might account for the signaling specificity of the Wnt pathways. As Ca2+ release was the first described feature of the noncanonical pathway, and as Ca2+ probably plays a key role in the activation of CamKII and PKC, Kuhl M, et al., (Trends Genet July 2000 ;16(7):279-83) have named this Wnt pathway the Wnt/Ca2+ pathway.

[0236] Many constituents of Wnt signaling pathways are expressed in the developing and mature nervous systems. Recent work has shown that Wnt signaling controls initial formation of the neural plate and many subsequent patterning decisions in the embryonic nervous system, including formation of the neural crest. Wnt signaling continues to be important at later stages of development. Wnts have been shown to regulate the anatomy of the neuronal cytoskeleton and the differentiation of synapses in the cerebellum. Wnt signaling has been demonstrated to regulate apoptosis and may participate in degenerative processes leading to cell death in the aging brain.

[0237] Recent genetic studies have shown that the signalling factor Wnt3a is required for formation of the hippocampus; the developmental consequences of Wnt signalling in the hippocampus are mediated by multiple HMG-box transcription factors, with LEF-1 being required just for formation of the dentate gyrus.

[0238] Wnt-1 was first identified as a protooncogene activated by viral insertion in mouse mammary tumors. Transgenic expression of this gene using a mouse mammary tumor virus LTR enhancer causes extensive ductal hyperplasia early in life and mammary adenocarcinomas in approximately 50% of the female transgenic (TG) mice by 6 months of age. Metastasis to the lung and proximal lymph nodes is rare at the time tumors are detected but frequent after the removal of the primary neoplasm. The potent mitogenic effect mediated by Wnt-1 expression does not require estrogen stimulation; tumors form after an increased latency in estrogen receptor alpha-null mice. Several genetic lesions, including inactivation of p53 and over-expression of Fgf-3, collaborate with Wnt-1 in leading to mammary tumors, but loss of Sky and inactivation of one allele of Rb do not affect the rate of tumor formation in Wnt-1 TG mice.

[0239] Communication between cells is often mediated by secreted signaling molecules that bind cell surface receptors and modulate the activity of specific intracellular effectors. The Wnt family of secreted glycoproteins is one group of signaling molecules that has been shown to control a variety of developmental processes including cell fate specification, cell proliferation, cell polarity and cell migration. In addition, mis-regulation of Wnt signaling can cause developmental defects and is implicated in the genesis of several human cancers. The importance of Wnt signaling in development and in clinical pathologies is underscored by the large number of primary research papers examining various aspects of Wnt signaling that have been published in the past several years.

[0240] Reproductive tract development and function is regulated by circulating steroid hormones. In the mammalian female reproductive tract, estrogenic compounds direct many aspects of cytodifferentiation including uterine gland formation, smooth muscle morphology, and epithelial differentiation. While it is clear that these hormones act through their cognate nuclear receptors, it is less clear what signaling events follow hormonal stimulation that govern cytodifferentiation. Recent advances in molecular embryology and cancer cell biology have identified the Wnt family of secreted signaling molecules. Discussed here are recent advances that point to a definitive role during uterine development and adult function for one member of the Wnt gene family, Wnt-7a. In addition, recent data is reviewed that implicates Wnt-7a deregulation in response to pre-natal exposure to the synthetic estrogenic compound, DES. These advances point to an important role for the Wnt gene family in various reproductive tract pathologies including cancer.

[0241] Holoprosencephaly (HPE) is the most common developmental defect of the forebrain in humans. Several distinct human genes for holoprosencephaly have now been identified. They include Sonic hedgehog (SHH), ZIC2, and SIX3. Many additional genes involved in forebrain development are rapidly being cloned and characterized in model vertebrate organisms. These include Patched (Ptc), Smoothened (Smo), cubitus interuptus (ci)/Gli, wingless (wg/Wnt, decapentaplegic (dpp)/BMP, Hedgehog interacting protein (Hip), nodal, Smads, One-eyed pinhead (Oep), and TG-Interacting Factor (TGIF). However, further analysis is needed before their roles in HPE can be established.

[0242] Female reproductive hormones control mammary gland morphogenesis. In the absence of the progesterone receptor (PR) from the mammary epithelium, ductal side-branching fails to occur. Brisken C, et al. (Genes Dev March 2000 15;14(6):650-4) overcame this defect by ectopic expression of the protooncogene Wnt-1. Transplantation of mammary epithelia from Wnt-4(−)/(−) mice shows that Wnt-4 has an essential role in side-branching early in pregnancy. PR and Wnt-4 mRNAs colocalize to the luminal compartment of the ductal epithelium. Progesterone induces Wnt-4 in mammary epithelial cells and is required for increased Wnt-4 expression during pregnancy. Thus, Wnt signaling is essential in mediating progesterone function during mammary gland morphogenesis.

[0243] Synapse formation requires changes in cell morphology and the upregulation and localization of synaptic proteins. In the cerebellum, mossy fibers undergo extensive remodeling as they contact several granule cells and form complex, multisynaptic glomerular rosettes. Hall A C, et al., (Cell March 3, 2000; 100(5):525-35) showed that granule cells secrete factors that induce axon and growth cone remodeling in mossy fibers. This effect is blocked by the WNT antagonist, sFRP-1, and mimicked by WNT-7a, which is expressed by granule cells. WNT-7a also induces synapsin I clustering at remodeled areas of mossy fibers, a preliminary step in synaptogenesis. Wnt-7a mutant mice show a delay in the morphological maturation of glomerular rosettes and in the accumulation of synapsin I. We propose that WNT-7a can function as a synaptogenic factor.

[0244] Estrogens have important functions in mammary gland development and carcinogenesis. To better define these roles, Bocchinfuso W P, et al., (Cancer Res April 1999 15;59(8): 1869-76) have used two previously characterized lines of genetically altered mice: estrogen receptor-alpha (ER alpha) knockout (ERKO) mice, which lack the gene encoding ER alpha, and mouse mammary virus tumor (MMTV)-Wnt-1 transgenic mice (Wnt-1 TG), which develop mammary hyperplasia and neoplasia due to ectopic production of the Wnt-1 secretory glycoprotein. Bocchinfuso W P, et al. have crossed these lines to ascertain the effects of ER alpha deficiency on mammary gland development and carcinogenesis in mice expressing the Wnt-1 transgene. Introduction of the Wnt-i transgene into the ERKO background stimulates proliferation of alveolar-like epithelium, indicating that Wnt-1 protein can promote mitogenesis in the absence of an ER alpha-mediated response. The hyperplastic glandular tissue remains confined to the nipple region, implying that the requirement for ER alpha in ductal expansion is not overcome by ectopic Wnt-1. Tumors were detected in virgin ERKO females expressing the Wnt-1 transgene at an average age (48 weeks) that is twice that seen in virgin Wnt-1 TG mice (24 weeks) competent to produce ER alpha. Prepubertal ovariectomy of Wnt-1 TG mice also extended tumor latency to 42 weeks. However, pregnancy did not appear to accelerate the appearance of tumors in Wnt-1 TG mice, and tumor growth rates were not measurably affected by late ovariectomy. Small hyperplastic mammary glands were observed in Wnt-1 TG males, regardless of ER alpha gene status; the glands were similar in appearance to those found in ERKO/Wnt-1 TG females. Mammary tumors also occurred in Wnt-1 TG males; latency tended to be longer in the heterozygous ER alpha and ERKO males (86 to 100 weeks) than in wild-type ER alpha mice (ca. 75 weeks). Bocchinfuso W P, et al. concluded that ectopic expression of the Wnt-1 proto-oncogene can induce mammary hyperplasia and tumorigenesis in the absence of ER alpha in female and male mice. The delayed time of tumor appearance may depend on the number of cells at risk of secondary events in the hyperplastic glands, on the carcinogenesis-promoting effects of ER alpha signaling, or on both.

[0245] Wnt-1 and Wnt-3a proto-oncogenes have been implicated in the development of midbrain and hindbrain structures. Evidence for such a role has been derived from in situ hybridization studies showing Wnt-1 and -3a expression in developing cranial and spinal cord regions and from studies of mutant mice whose Wnt-1 genes have undergone targeted disruption by homologous recombination. Wnt-1 null mutants exhibit cranial defects but no spinal cord abnormalities, despite expression of the gene in these regions. The absence of spinal cord abnormalities is thought to be due to a functional compensation of the Wnt-1 deficiency by related genes, a problem that has complicated the analysis of null mutants of other developmental genes as well. Augustine K, et al., (Dev Genet 1993; 14(6):500-20) describe the attenuation of Wnt-1 expression using antisense oligonucleotide inhibition in mouse embryos grown in culture. Augustine K, et al. induced similar mid-and hindbrain abnormalities as those seen in the Wnt-1 null mutant mice. Attenuation of Wnt-1 expression was also associated with cardiomegaly resulting in hemostasis. These findings are consistent with the possibility that a subset of Wnt-1 expressing cells include neural crest cells known to contribute to septation of the truncus arteriosus and to formation of the visceral arches. Antisense knockout of Wnt-3a, a gene structurally related to Wnt-1, targeted the forebrain and midbrain region, which were hypoplastic and failed to expand, and the spinal cord, which exhibited lateral outpocketings at the level of the forelimb buds. Dual antisense knockouts of Wnt-1 and Wnt-3a targeted all brain regions leading to incomplete closure of the cranial neural folds, and an increase in the number and severity of outpocketings along the spinal cord, suggesting that these genes complement one another to produce normal patterning of the spinal cord. The short time required to assess the mutant phenotype (2 days) and the need for limited sequence information of the target gene (20-25 nucleotides) make this antisense oligonucleotide/whole embryo culture system ideal for testing the importance of specific genes and their interactions in murine embryonic development.

[0246] Wnt-1 (previously known as int-1) is a proto-oncogene induced by the integration of the mouse mammary tumor virus. It is thought to play a role in intercellular communication and seems to be a signalling molecule important in the development of the central nervous system (CNS). The sequence of wnt-1 is highly conserved in mammals, fish, and amphibians. Wnt-1 is a member of a large family of related proteins that are all thought to be developmental regulators. These proteins are known as wnt-2 (also known as irp), wnt-3 up to wnt-15. At least four members of this family are present in Drosophila. One of them, wingless (wg), is implicated in segmentation polarity. All these proteins share the following features characteristics of secretory proteins, a signal peptide, several potential N-glycosylation sites and 22 conserved cysteines that are probably involved in disulfide bonds. The Wnt proteins seem to adhere to the plasma membrane of the secreting cells and are therefore likely tosignal over only few cell diameters.

[0247] The disclosed NOV8 nucleic acid of the invention encoding a Wnt-14-like protein includes the nucleic acid whose sequence is provided in Table 8A or a fragment thereof. The invention also includes a mutant or variant nucleic acid any of whose bases may be changed from the corresponding base shown in Table 8A while still encoding a protein that maintains its Wnt-14-like activities and physiological functions, or a fragment of such a nucleic acid. The invention further includes nucleic acids whose sequences are complementary to those just described, including nucleic acid fragments that are complementary to any of the nucleic acids just described. The invention additionally includes nucleic acids or nucleic acid fragments, or complements thereto, whose structures include chemical modifications. Such modifications include, by way of nonlimiting example, modified bases, and nucleic acids whose sugar phosphate backbones are modified or derivatized. These modifications are carried out at least in part to enhance the chemical stability of the modified nucleic acid, such that they may be used, for example, as antisense binding nucleic acids in therapeutic applications in a subject. In the mutant or variant nucleic acids, and their complements, up to about 23 percent of the bases may be so changed.

[0248] The disclosed NOV8 protein of the invention includes the Wnt-14-like protein whose sequence is provided in Table 8B. The invention also includes a mutant or variant protein any of whose residues may be changed from the corresponding residue shown in Table 8B while still encoding a protein that maintains its Wnt-14-like activities and physiological functions, or a functional fragment thereof. In the mutant or variant protein, up to about 24 percent of the residues may be so changed.

[0249] The protein similarity information, expression pattern, and map location for the Wnt-14-like protein and nucleic acid (NOV8) disclosed herein suggest that NOV8 may have important structural and/or physiological functions characteristic of the Wnt-14-like family. Therefore, the NOV8 nucleic acids and proteins of the invention are useful in potential diagnostic and therapeutic applications. These include serving as a specific or selective nucleic acid or protein diagnostic and/or prognostic marker, wherein the presence or amount of the nucleic acid or the protein are to be assessed, as well as potential therapeutic applications such as the following: (i) a protein therapeutic, (ii) a small molecule drug target, (iii) an antibody target (therapeutic, diagnostic, drug targeting/cytotoxic antibody), (iv) a nucleic acid useful in gene therapy (gene delivery/gene ablation), and (v) a composition promoting tissue regeneration in vitro and in vivo.

[0250] The NOV8 nucleic acids and proteins of the invention are useful in potential diagnostic and therapeutic applications implicated in various diseases and disorders described below and/or other pathologies. For example, the compositions of the present invention will have efficacy for treatment of patients suffering from Von Hippel-Lindau (VHL) syndrome, Alzheimer's disease, stroke, tuberous sclerosis, hypercalceimia, Parkinson's disease, Huntington's disease, cerebral palsy, epilepsy, Lesch-Nyhan syndrome, multiple sclerosis, ataxia-telangiectasia, leukodystrophies, behavioral disorders, addiction, anxiety, pain, neurodegeneration, cancer, developmental defects, and/or other pathologies/disorders. The NOV8 nucleic acid, or fragments thereof, may further be useful in diagnostic applications, wherein the presence or amount of the nucleic acid or the protein are to be assessed.

[0251] NOV8 nucleic acids and polypeptides are further useful in the generation of antibodies that bind immunospecifically to the novel substances of the invention for use in therapeutic or diagnostic methods. These antibodies may be generated according to methods known in the art, using prediction from hydrophobicity charts, as described in the “Anti-NOVX Antibodies” section below. For example the disclosed NOV8 protein have multiple hydrophilic regions, each of which can be used as an immunogen. In one embodiment, contemplated NOV8 epitope is from about amino acids 40 to 70. In another embodiment, the comtemplated NOV8 epitope is from about amino acids 80 to 110. In further embodiments, the contemplated NOV8 epitope is from about amino acids 120 to 200, from about amino acids 220 to 245, from about amino acids 250 to 280, or from about amino acids 290 to 340. This novel protein also has value in development of powerful assay system for functional analysis of various human disorders, which will help in understanding of pathology of the disease and development of new drug targets for various disorders.

[0252] NOV9

[0253] A disclosed NOV9 nucleic acid of 2037 nucleotides (also referred to as AC069250_{—}28_da1) encoding a beta-adrenergic receptor kinase-like protein is shown in Table 9A. An open reading frame was identified beginning with an ATG initiation codon at nucleotides 16-18 and ending with a TGA codon at nucleotides 2020-2022. A putative untranslated region upstream from the initiation codon and downstream from the termination codon is underlined in Table 9A. The start and stop codons are in bold letters. Single nucleotide polymorphism data for NOV9 is discussed in further detail in Example 3.

TABLE 9A
NOV9 nucleotide sequence.

(SEQ ID NO:23)

GCCGCCGCCGCCAAGATGGCGGACCTGGAGGCGGTGCTGGCCGACGTCAGCTACCTGATGGCCATGGAGAAG
AGCAAGGCCACGCCGGCCGCGCGCGCCAGCAAGAAGATACTGCTGCCCGAGCCCAGCATCCGCAGTGTCATG
CAGAAGTACCTGGAGGACCGGCGCGAGGTGACCTTTGAGAAGATCTTTTCCCAGAAGCTGGGGTACCTGCTC
TTCCGAGACTTCTGCCTGAACCACCTGCAGGAGGCCAGGCCCTTGGTGGAATTCTATGAGGAGATCAAGAAG
TACGAGAAGCTGGAGACGGAGGAGGAGCGTGTGGCCCGCAGCCGGGAGATCTTCGACTCATACATCATGAAG
GAGCTGCTGGCCTGCTCGCATCCCTTCTCGAAGAGTGCCACTGAGCATGTCCAAGGCCACCTGGGGAAGAAG
CAGGTGCCTCCGGATCTCTTCCAGCCATACATCGAAGAGATTTGTCAAAACCTCCGAGGGGACGTGTTCCAG
AAATTCATTGAGACCGATAAGTTCACACGGTTTTGCCAGTGGAAGAATGTGGAGCTCAACATCCACCTGACC
ATGAATGACTTCAGCGTGCATCGCATCATTGGGCGCGGGGGCTTTGGCGAGGTCTATGGGTGCCGGAAGGCT
GACACAGGCAAGATGTACGCCATGAAGTGCCTGGACAAAAAGCGCATCAAGATGAAGCAGGGGGAGACCCTG
GCCCTGAACGAGCGCATCATGCTCTCGCTCGTCAGCACTGGGCACTGCCCATTCATTGTCTGCATGTCATAC
GCGTTCCACACGCCAGACAAGCTCAGCTTCATCCTGGACCTCATGAACGGTGGGGACCTGCACTACCACCTC
TCCCAGCACGGGGTCTTCTCAGAGGCTGACATGCGCTTCTATGCGGCCGAGATCATCCTGGGCCTGGAGCAC
ATGCACAACCGCTTCGTGGTCTACCGGGACCTGAAGCCAGCCAACATCCTTCTGGACGAGCATGGCCACGTG
CGGATCTCGGACCTGGGCCTGGCCTGTGACTTCTCCAAGAAGAAGCCCCATGCCAGCGTGGGCACCCACGGG
TACATGGCTCCGGAGGTCCTGCAGAAGGGCGTGGCCTACGACAGCAGTGCCGACTGGTTCTCTCTGGGGTGC
ATGCTCTTCAAGTTGCTGCGGGGGCACAGCCCCTTCCGGCAGCACAAGACCAAAGACAAGCATGAGATCGAC
CGCATGACGCTGACGATGGCCGTGGAGCTGCCCGACTCCTTCTCCCCTGAACTACGCTCCCTGCTGGAGGGG
TTGCTGCAGAGGGATGTCAACCGGAGATTGGGCTGCCTCGGCCGAGGGGCTCAGGAGCTGAAAGAGAGCCCC
TTTTTCCOCTCCCTGGACTGGCAGATGGTCTTCTTGCAGAAGTACCCTCCCCCGCTGATCCCCCCACGAGGG
GAGGTGAACGCGGCCGACGCCTTCGACATTGGCTCCTTCGATGAGGAGGACACAAAAGGAATCAAGCAGGAG
GTGGCAGAGACTGTCTTCGACACCATCAACGCTGAGACAGACCGGCTGGAGGCTCGCAAGAAAGCCAAGAAC
AAGCAGCTGGGCCATGAGGAAGACTACOCCCTGGGCAAGGACTGCATCATGCATGGCTACATGTCCAAGATG
GGCAACCCCTTCCTGACCCAGTGGCAGCGGCGGTACTTCTACCTGTTCCCCAACCGCCTCGAGTGGCGGGGC
GAGCCCGAGGCCCCGCAGAGCCTGCTGACCATGGAGGAGATCCAGTCGGTGGAGGAGACGCAGATCAAGGAG
CGCAAGTGCCTGCTCCTCAAGATCCGCGGTGCGAAACAGTTCATTTTGCAGTGCGATACCGACCCTGAGCTG
GTGCAGTGGAAGAAGGAGCTGCGCGACGCCTACCGCGAGGCCCAGCAGCTGGTGCAGCGGGTGCCCAAGATG
AAGAACAAGCCGCGCTCGCCCGTGGTGGAGCTGAGCAAGGTGCCGCTGGTCCAGCGCGGCAGTGCCAACGGC
CTCTGACCCGCCCACCCGCCT

[0254] In a search of public sequence databases, the NOV9 nucleic acid sequence, located on chromsome 11 has 1546 of 1574 bases (98%) identical to a beta-adrenergic receptor kinase 1 mRNA from Homo sapiens, (GENBANK-ID: HUMBARK1A) (E=0.0). Public nucleotide databases include all GenBank databases and the GeneSeq patent database.

[0255] The disclosed NOV9 polypeptide (SEQ ID NO: 24) encoded by SEQ ID NO: 23 has 668 amino acid residues and is presented in Table 9B using the one-letter amino acid code. Signal P, Psort and/or Hydropathy results predict that NOV9 has no signal peptide and is likely to be localized in the nucleus with a certainty of 0.3000. In other embodiments, NOV9 may also be localized to the microbody (peroxisome) with acertainty of 0.1478, the mitrochondrial matrix (lumen) with a certainty of 0.1000 or in the lysosome (lumen) with a certainty of 0.1000.

TABLE 9B
Encoded NOV9 protein sequence.

(SEQ ID NO:24)

MADLEAVLADVSYLMAMEKSKATPAARASKKILLPEPSIRSVMQKYLEDRGEVTFEKIFSQKLGYLLFRDFC
LNHLEEARPLVEFYEEIKKYEKLETEEERVARSREIFDSYIMKELLACSHPFSKSATEHVQGHLGKKQVPPD
LFQPYIEEICQNLRGDVFQKFIESDKFTRFCQWKNVELNIHLTMNDFSVHRIIGRGGFGEVYGCRKADTGKM
YAMKCLDKKRIKMKQCETLALNERIMLSLVSTGDCPFIVCMSYAFHTPDKLSFILDLMNGGDLHYHLSQHGV
FSEADMRFYAAEIILGLEHMHNRFVVYRDLKPANILLDEHGHVRISDLGLACDFSKKKPHASVGTHGYMAPE
VLQKGVAYDSSADWFSLGCMLFKLLRGHSPFRQHKTKDKHEIDRMTLTMAVELPDSFSPELRSLLEGLLQRD
VNRRLGCLGRGAQEVKESPFFRSLDWQMVFLQKYPPPLIPPRGEVNAADAFDIGSFDEEDTKGIKQEVAETV
FDTINAETDRLEARKKAKNKQLGHEEDYALGKDCIMHGYMSKMGNPFLTQWQRRYFYLFPNRLEWRGEGEAP
QSLLTMEEIQSVEETQIKERKCLLLKIRGGKQFILQCDSDPELVQWKKELRDAYREAQQLVQRVPKMKNKPR
SPVVELSKVPLVQRGSANGL

[0256] A search of sequence databases reveals that the NOV9 amino acid sequence has 495 of 497 amino acid residues (99%) identical to, and 495 of 497 amino acid residues (99%) similar to, the 689 amino acid residue beta-adrenergic receptor kinase from Homo sapiens (A53791) (E=0.0). Public amino acid databases include the GenBank databases, SwissProt, PDB and PIR.

[0257] NOV9 is expressed in at least the following tissues: adrenal gland, bone marrow, brain—amygdala, brain—cerebellum, brain—hippocampus, brain—substantia nigra, brain—thalamus, brain—whole, fetal brain, fetal kidney, fetal liver, fetal lung, heart, kidney, lymphoma—Raji, mammary gland, pancreas, pituitary gland, placenta, prostate, salivary gland, skeletal muscle, small intestine, spinal cord, spleen, stomach, testis, thyroid, trachea, uterus. This information was derived by determining the tissue sources of the sequences that were included in the invention including but not limited to SeqCalling sources, Public EST sources, Literature sources, and/or RACE sources.

[0258] In addition, the sequence is predicted to be expressed in blood leukocytes because of the expression pattern of (GENBANK-ID:gb:GENBANK-ID:HUMBARK1A|acc:M80776.1) a closely related Human beta-adrenergic receptor kinase 1 mRNA, complete cds homolog in species Homo sapiens.

[0259] The disclosed NOV9 polypeptide has homology to the amino acid sequences shown in the BLASTP data listed in Table 9C.

TABLE 9C
BLAST results for NOV9

| Gene Index/ | | Length | Identity | Positives | |
|---|---|---|---|---|---|
| Identifier | Protein/Organism | (aa) | (%) | (%) | Expect |
| ptnr: pir-id: A53791 | beta-adrenergic- | 689 | 495/497 | 495/497 | 0.0 |
| | receptor kinase | | (99%) | (99%) | |
| | (EC 2.7.1.126) 1 - | | | | |
| | human | | | | |
| ptnr: SWISSPROT- | Beta-adrenergic | 689 | 494/497 | 495/497 | 0.0 |
| ACC: P25098 | receptor kinase 1 | | (99%) | (99%) | |
| | (EC 2.7.1.126) | | | | |
| ptnr: SPTREMBL- | SIMILAR TO | 687 | 490/495 | 493/495 | 0.0 |
| ACC: Q99LL8 | ADRENERGIC, BETA, | | (98%), | (99%) | |
| | RECEPTOR KINASE 1 - | | | | |
| | Mus musculus | | | | |
| ptnr: SWISSPROT- | Beta-adrenergic | 689 | 489/497 | 493/497 | 0.0 |
| ACC: P26817 | receptor kinase 1 | | (98%) | (99%) | |
| ptnr: SPTREMBL- | G PROTEIN | 689 | 490/497 | 494/497 | 0.0 |
| ACC: Q99MK8 | RECEPTOR KINASE 2 | | (98%) | (99%) | |

[0260] The homology between these and other sequences is shown graphically in the ClustalW analysis shown in Table 9D. In the ClustalW alignment of the NOV9 proteins, as well as all other ClustalW analyses herein, the black outlined amino acid residues indicate regions of conserved sequence (i.e., regions that may be required to preserve structural or functional properties), whereas non-highlighted amino acid residues are less conserved and can potentially be altered to a much broader extent without altering protein structure or function.

[image]

[image]

[image]

[0261] Tables 9E-9L list the domain descriptions from DOMAIN analysis results against NOV9. This indicates that the NOV9 sequence has properties similar to those of other proteins known to contain this domain.

TABLE 9E
Domain Analysis of NOV9

gnl|Smart|smart00220, S_TKc, Serine Threonine protein kineses,
catalytic domain; Phosphotransferases. Serine or threonine-specific
kinase subfamily. (SEQ ID NO:98)
CD-Length = 256 residues, 100.0% aligned
Score = 237 bits (604), Expect = 2e−63

| | | | |
|---|---|---|---|
| Query: | 191 | FSVHRIIGRGGFGEVYGCRKADTGKMYAMKCLDKKRIKMKQGETLALNERIMLSLVSTGD | 250 |
| | | + + ++\|+\| \|\|+\|\| \| \|\|\|+ \|+\| + \|+++\| \|+ \| \| \| +\| + \| | |
| Sbjct: | 1 | YELLEVLGKGAFGKVYLARDKKTGKLVAIKVIKKEKLKKKKRER-ILREIKILKKL---D | 56 |
| Query: | 251 | CPFIVCMSYAFHTPDKLSFILDLMIJGGDLYHLSQHGVFSEADMRFYAAEIILGLEHMHN | 310 |
| | | \| \|\| + \| \|\|\| +++ \|\|\|\| \| + \| \|\| + \|\|\|\| +\|+ \|\|++\|+ | |
| Sbjct: | 57 | HPNIVKLYDVFEDDDKLYLVMEYCECCDLFDLLKKRGRLSEDEARFYARQILSALEYLHS | 116 |
| Query: | 311 | RFVVYRDLKPANILLDEHGHVRISDLGLACDFSKKKPHAS--VGTHGYMAPEVLQKGVAY | 368 |
| | | + +++\|\|\|\|\| \|\|\|\|\| \|\|\|+++\| \|\|\| + \|\|\| \|\|\|\|\|\|\| \| \| | |
| Sbjct: | 117 | QGIIHRDLKPENILLDSDGHVKLADFGLAKQLDSGGTLLTTFVGTPEYMAPEVL-LGKGY | 175 |
| Query: | 369 | DSSADWFSLCCMLFKLLRGHSPFRQHKTKDK-HEIDRMTLTMAVELPDSFSPELRSLLEG | 427 |
| | | + \| +\|\|\| +\|++\|\| \| \|\| + \|\|\| + \|++ | |
| Sbjct: | 176 | GKAVDIWSLGVILYELLTGKPPFPGDDQLLALFKKIGKPPPPFPPPEWKISPEAKDLIKK | 235 |
| Query: | 428 | LLQRDVNRRLGCLGRGAQEVKESPFF 453 | |
| | | \|\| +\| +\|\| \|+\| \| \|\|\| | |
| Sbjct: | 236 | LLVKDPEKRL-----TAEEALEHPFF 256 | |

[0262] TABLE 9F
Domain Analysis of NOV9

gnl|Pfam|pfam00069, pkinase, Protein kinase domain. (SEQ ID NO:99)
CD-Length = 256 residues, 100.0% aligned
Score = 221 bits (562), Expect = 1e−58

| | | | |
|---|---|---|---|
| Query: | 191 | FSVHRIIGRGGFGEVYGCRKADTGKMYAMKCLDKKRIKMKQGETLALNERIMLSLVSTGD | 250 |
| | | + + +\| \| \|\|+\|\| \| \|\|\|++ \|+\| \| \|+ + \|+ \| \| +\| +\| | |
| Sbjct: | 1 | YELGEKLGSGAFGKVYKGKHKDTGEIVAIKILKKRSLSEKKKRFL--REIQILRRLS--- | 55 |
| Query: | 251 | CPFIVCMSYAFHTPDKLSFILDLMNCGDLHYHLSQHGVF-SEADMRFYAAEIILGLEHMH | 309 |
| | | \| \|\| + \| \| \| +++ \| \|\|\|\| +\| ++\|+ \|\| + + \| +\|+ \|\|\|++\| | |
| Sbjct: | 56 | HPNIVRLLGVFEEDDHLYLVMEYMEGGDLFDYLRRNGLLLSEKEAKKIALQILRGLEYLH | 115 |
| Query: | 310 | NRFVVYRDLKPANILLDEHGHVRISDLGLACDF---SKKKPEASVGTHGYMAPEVLQKGV | 366 |
| | | +\| +\|+\|\|\|\|\| \|\|\|\|\|\|+\| \|+\|+\| \|\|\| \| +\| \|\|\| \|\|\|\|\|\| +\| | |
| Sbjct: | 116 | SRGIVHRDLKPENILLDENGTVKIADFGLARKLESSSYEKLTTFVGTPEYMAPEVL-EGR | 174 |
| Query: | 367 | AYDSSADWFSLGCMLFKLLRGHSPFRQHKTKDRHEIDRMTLTMAVELPDSFSPELRSLLE | 426 |
| | | \| \| \| +\|\|\| +\|++\|\| \| \|\| ++ + + + \|\| + \| \|\|+ \|++ | |
| Sbjct: | 175 | GYSSKVDVWSLGVILYELLTGKLPFPGIDPLEELFRIKERPRLRLPLPPNCSEELKDLIK | 234 |
| Query: | 427 | GLLQRDVNRRLGCLGRGAQEVKESPFF 453 | |
| | | \| +\| +\| \|+\|+ \|+\| | |
| Sbjct: | 235 | KCLNKDPEKRP-----TAKEILNHPWF 256 | |

[0263] TABLE 9G
Domain Analysis of NOV9

gnl|Pfam|pfam00615, RGS, Regulator of G protein signaling domain. RGS
family members are GTPase-activating proteins for heterotrimeric G-
protein alpha-subunits. (SEQ ID NO:106)
CD-Length = 119 residues, 100.0% aligned
Score = 130 bits (326), Expect = 3e−3l

| | | | |
|---|---|---|---|
| Query: | 54 | TFEKIFSQKL0YLLFRDFCLNHLEEA3PLVEEYEEIKKYEKLETEEERVARSREIFDSYI | 113 |
| | | +\|\|\|+ \| +\| \|\|\|\|+\| \| +\|\|+ +++\|\|\| \| ++\| ++\|\|\|+\| +\| | |
| Sbjct: | 1 | SFEKLLKQPIGRLLFREFLETEFSE--ENLEFWLAVEEYEKTEDPDKRPDKAREIYDEFI | 58 |
| Query: | 114 | MKELLACSHPFSKSATEHVQCHLGKKQVPPDLFQPYIEEICQNLRCDVFQRFTESDKETR | 173 |
| | | \| \|\| \| +\| \| \|\|\|+ \|\| +\|\|\| \| +\|+\|\|\| \|\|\| | |
| Sbjct: | 59 | SPEAPKPEVNLDSELREHTQDNL-LKAPTKDLFEEAQREIYDLMRGDSFPRFLESDYFTR | 117 |
| Query: | 174 | FC 175 | |
| | | \| | |
| Sbjct: | 118 | FL 119 | |

[0264] TABLE 9H
Domain Analysis of NOV9

gnl|Smart|smart00219, TyrKc, Tyrosine kinase, catalytic domain;
Pbosphotransferases. Tyrosine-specific kinase subfamily. (SEQ ID NO:100)
CD-Length = 258 residues, 94.6% aligned
Score = 110 bits (275), Expect = 3e−25

| | | | |
|---|---|---|---|
| Query: | 195 | RIIGRGGFGEVYGCR---KADTGKMYAMECLDEERIKMKQGETLALNE-RIMLSLVSTGD | 250 |
| | | + +\| \| \|\|\|\|\| \| \|+\| \| \| +\| \| \| \|+\| \| \| | |
| Sbjct: | 5 | KKLGEGAFGEVYKGTLKGKGGVEVEVAVKTL--KEDASEQQIEEFLREARLMRKL----D | 58 |
| Query: | 251 | CPFIVCMSYAFHTPDKLSFILDLMNGGDLHYHLSQHG--VFSEADMRFYAAEIILGLEHM | 308 |
| | | \| \|\| + + \| +++ \| \|\|\|\| +\| ++ \| +\|+ +\| +\| \|+\|++ | |
| Sbjct: | 59 | HPNIVKLLGVCTEEEPLMIVMEYMEGGDLLDYLRKNRPKELSLSDLLSFALQIARGMEYL | 118 |
| Query: | 309 | HNRFVVYRDLKPANILLDEHGHVRISDLGLACDFSKKKPHASVGTHG----YMAPEVLQK | 364 |
| | | ++ \|+\|\|\| \| \|+ \|+ \|+\|+\| \|\|\| \| + + +\|\|\|\| \|+ | |
| Sbjct: | 119 | ESKNFVHRDLAARNCLVGENKTVKIADFGLARDLYDDDYYRKKKSPRLPIRWMAPESLKD | 178 |
| Query: | 365 | GVAYDSSADWFSLGCMLFKLL-RGHSPFRQHKTKDKHEIDRMTLTMAVELPDSFSPELRS | 423 |
| | | \| + \| +\| +\| \| +\|+++ \| \|\|+ ++ ++ + + \| + \|+ | |
| Sbjct: | 179 | GK-FTSESDVWSFGVLLWEIFTLGESPY--PGMSNEEVLEYLKKGYRLPQPPNCPDEIYD | 235 |
| Query: | 424 | LLEGLLQRDVNRR 436 | |
| | | \|+ \| \| | |
| Sbjct: | 236 | LMLQCWAEDPEDR 248 | |

[0265] TABLE 9I
Domain Analysis of NOV9

gnl|Smart|smart00315, RGS, Regulator of G protein signalling domain;
RGS family members are GTPase-activating proteins for heterotrimeric
G-protein alpha-subunits. (SEQ ID NO:107)
CD-Length = 119 residues, 100.0% aligned
Score = 100 bits (248), Expect = 3e−22

| | | | |
|---|---|---|---|
| Query: | 54 | TFEKIFSQKLGYLLFRDFCLNHLEEARPLVEFYEEIKKYEKLETEEERVARSREIFDSYI | 113 |
| | | + \| + +\| \|\|\|\|+\| + \| +\|\|+ +++++\| \| \|\|\|\| ++++\|\|+\| \|+ | |
| Sbjct: | 1 | SLESLLRDPIGRLLFREFLESEFSE--ENLEFWLAVEEFKKAEDEEERRSKAKEIYDRYL | 58 |
| Query: | 114 | MKELLACSHPFSKSATEHVQGHLGKKQVPPDLFQPYIEEICQNLRGDVFQKFIESDKFTR | 173 |
| | | \| ++ +\| ++ \|\|\|\|\| \|\|+ + \| \| + +\|+\|\|\| + \| | |
| Sbjct: | 59 | SPNAPKE-VNLDSDLREEIEENLKNEEPPPDLFDEAQEEVYELLEKDSYPRFLESDYYLR | 117 |
| Query: | 174 | FC 175 | |
| | | \| | |
| Sbjct: | 118 | FL 119 | |

[0266] TABLE 9J
Domain Analysis of NOV9

gnl|Smart|smart00233, PH, Pleckstrin homology domain.; Domain commonly
found in eukaryotic signalling proteins. The domain family possesses
multiple functions including the abilities to bind inositol
phosphates, and various proteins. PH domains have been found to
possess inserted domains (such as in PLC gamma, syntrophins) and to be
inserted within other domains. Mutations in Brutons tyrosine kinase
(Btk) within its PH domain cause X-linked agammaglobulinaemia (XLA) in
patients. Point mutations cluster into the positively charged end of
the molecule around the predicted binding site for
phosphatidylinositol lipids. (SEQ ID NO:108)
CD-Length = 104 residues, 95.2% aligned
Score = 62.0 bits (149), Expect = 1e−10

| | | | |
|---|---|---|---|
| Query: | 539 | IMHGYMSKMGNPFLTQWQRRYFYLFPNRLEW-----RGEGEAPQSLLRMEEIQ---SVEE | 590 |
| | | \| \|++ \| + \|++\|\|\| \|\| \| + + \|+ + + + + | |
| Sbjct: | 2 | IKEGWLLKKSSGGKKSWKKRYFVLFNGVLLYYKSKKKKSSSKPKGSIPLSGCTVREAPDS | 61 |
| Query: | 591 | TQIKERKCLLLKIRGGKQFILQCDSDPELVQWKKELRDA 629 | |
| | | \|++ \| + \| +\|\| +\|+ \| +\| + \|\| \| | |
| Sbjct: | 62 | DSDKKKNCFEIVTPDRKTLLLQAESEEERKEWVEALRKA 100 | |

[0267] TABLE 9K
Domain Analysis of NOV9

gnl|Pfam|pfam00169, PH, PH domain. PH stands for pleckstrin homology.
(SEQ ID NO:109)
CD-Length = 100 residues, 97.0% aligned
Score = 55.5 bits (132), Expect = 1e−08

| | | | |
|---|---|---|---|
| Query: | 539 | IMHGYMSKMGNPFLTQWQRRYFYLFPNRLEW---RGEGEAPQSLLTMEEIQSVEETQIKE | 595 |
| | | \|++ \| +\|++\|\|\|+\|\| + \| + + + \|+ + + + + | |
| Sbjct: | 2 | VKEGWLLKKSTVKKKRWKKRYFFLFNDVLIYYKDKKKSYEPKGSIPLSGCSVEDVPDSEF | 61 |
| Query: | 596 | RKCLLLKIR---GGKQFILQCDSDPELVQWKKELRDA 629 | |
| | | ++ ++\| \| + \|\|\|\| +\|+ \| \| \| ++ \| | |
| Sbjct: | 62 | KRPNCFQLRSRDGKETFILQAESEEERQDWIKAIQSA 98 | |

[0268] TABLE 9L
Domain Analysis of NOV9

gnl|Smart|smart00133, S_TK_X, Extension to Ser Thr-type protein
kinases (SEQ ID NO:110)
CD-Length = 63 residues, 87.3% aligned
Score = 42.7 bits (99), Expect = 7e−05

| | | | |
|---|---|---|---|
| Query: | 454 | RSLDWQMVFLQKYPPPLIPPRGEVNAADAFDIGSFDEEDTKGIKQEVAETVFDTINAETD | 513 |
| | | \| +\|\| + ++ \|\| +\| \| +\|\| \| \| ++ \| \| +\|+\| | |
| Sbjct: | 1 | RGIDWDKLENKEIEPPFVPKVK-----SPTDTSNFDPEFT---EESPVLTPVDPPLSESD | 52 |
| Query: | 514 | RLE 516 | |
| | | + \| | |
| Sbjct: | 53 | QDE 55 | |

[0269] Eukaryotic protein kinases are enzymes that belong to a very extensive family of proteins which share a conserved catalytic core common with both serine/threonine and tyrosine protein kinases. There are a number of conserved regions in the catalytic domain of protein kinases. In the N-terminal extremity of the catalytic domain there is a glycine-rich stretch of residues in the vicinity of a lysine residue, which has been shown to be involved in ATP binding. In the central part of the catalytic domain there is a conserved aspartic acid residue which is important for the catalytic activity of the enzyme.

[0270] The beta-adrenergic receptor kinase (beta ARK) catalyses the phosphorylation of the activated forms of the beta 2-adrenergic receptor (beta 2AR). The interaction between receptor and kinase is independent of second messengers and appears to involve a multipoint attachment of kinase and substrate with the specificity being restricted by both the primary amino acid sequence and conformation of the substrate. Kinetic, functional and sequence information reveals that rhodopsin kinase and beta ARK are closely related, suggesting they are members of a family of G-protein-coupled receptor kinases.

[0271] The beta-adrenergic signaling cascade is an important regulator of myocardial function. Significant alterations of this pathway are associated with several cardiovascular diseases, including congestive heart failure (CHF). CHF patients share several similar features, such as reduced cardiac contractility and neurohumoral activation to compensate the impaired cardiac function. In CHF patients, the cardiac renin-angitensin (RA) system, receptors, GTP-binding proteins, and their effector molecules are inevitably exposed to chronically elevated neurohumoral stimulation. A widely recognized concept is that a chronic increase in such stimulation can desensitize target cell receptors and the post-receptor signal transducing pathway. Included in these alterations is increased activity and expression of G protein-coupled receptor kinases (GRKs), such as the beta-adrenergic receptor kinase (beta ARK1), which phosphorylate and desensitize beta-adrenergic receptors (beta ARs). A body of evidence is accumulating that suggests that GRKs, in particular beta ARK1, are critical determinants of cardiac function under normal conditions and in disease states. Transgenic mice with myocardial-targeted alterations of GRK activity have shown profound changes in the in vivo functional performance of the heart. Included in these studies is the compelling finding that inhibition of beta ARK1 activity or expression significantly enhances cardiac function and potentiates beta AR signaling in failing cardiomyocytes. An uncoupling of beta2-adrenoceptors has been attributed to an increased activity and gene expression of beta-adrenergic receptor kinase in failing myocardium, leading to phosphorylation and uncoupling of receptors. The important physiological function of GRK2 as a modulator of the efficacy of GPCR signal transduction systems is exemplified by its relevance in cardiovascular physiopathology as well as by its emerging role in the regulation of chemokine receptors.

[0272] The disclosed NOV9 nucleic acid of the invention encoding a Beta-adrenergic receptor kinase-like protein includes the nucleic acid whose sequence is provided in Table 9A or a fragment thereof. The invention also includes a mutant or variant nucleic acid any of whose bases may be changed from the corresponding base shown in Table 9A while still encoding a protein that maintains its Beta-adrenergic receptor kinase-like activities and physiological functions, or a fragment of such a nucleic acid. The invention further includes nucleic acids whose sequences are complementary to those just described, including nucleic acid fragments that are complementary to any of the nucleic acids just described. The invention additionally includes nucleic acids or nucleic acid fragments, or complements thereto, whose structures include chemical modifications. Such modifications include, by way of nonlimiting example, modified bases, and nucleic acids whose sugar phosphate backbones are modified or derivatized. These modifications are carried out at least in part to enhance the chemical stability of the modified nucleic acid, such that they may be used, for example, as antisense binding nucleic acids in therapeutic applications in a subject. In the mutant or variant nucleic acids, and their complements, up to about 2 percent of the bases may be so changed.

[0273] The disclosed NOV9 protein of the invention includes the Beta-adrenergic receptor kinase-like protein whose sequence is provided in Table 9B. The invention also includes a mutant or variant protein any of whose residues may be changed from the corresponding residue shown in Table 9B while still encoding a protein that maintains its Beta-adrenergic receptor kinase-like activities and physiological functions, or a functional fragment thereof. In the mutant or variant protein, up to about 1 percent of the residues may be so changed.

[0274] The protein similarity information, expression pattern, and map location for the beta- adrenergic receptor kinase-like protein and the NOV9 proteins disclosed herein suggest that this beta-adrenergic receptor kinase may have important structural and/or physiological functions characteristic of the Ser/Thr protein kinases family. Therefore, the nucleic acids and proteins of the invention are useful in potential diagnostic and therapeutic applications and as a research tool. These include serving as a specific or selective nucleic acid or protein diagnostic and/or prognostic marker, wherein the presence or amount of the nucleic acid or the protein are to be assessed, as well as potential therapeutic applications such as the following: (i) a protein therapeutic, (ii) a small molecule drug target, (iii) an antibody target (therapeutic, diagnostic, drug targeting/cytotoxic antibody), (iv) a nucleic acid useful in gene therapy (gene delivery/gene ablation), and (v) a composition promoting tissue regeneration in vitro and in vivo (vi) biological defense weapon.

[0275] The NOV9 nucleic acids and proteins of the invention are useful in potential diagnostic and therapeutic applications implicated in various diseases and disorders described below and/or other pathologies. For example, the compositions of the present invention will have efficacy for treatment of patients suffering from heart failure, hypertension, secondary pathologies caused by heart failure and hypertension, and other diseases, disorders and conditions of the like. Additionally, the compositions of the present invention may have efficacy for treatment of patients suffering from conditions associated with the role of GRK2 in brain and in the regulation of chemokine receptors.. The NOV9 nucleic acid, or fragments thereof, may further be useful in diagnostic applications, wherein the presence or amount of the nucleic acid or the protein are to be assessed.

[0276] NOV9 nucleic acids and polypeptides are further useful in the generation of antibodies that bind immunospecifically to the novel substances of the invention for use in therapeutic or diagnostic methods. These antibodies may be generated according to methods known in the art, using prediction from hydrophobicity charts, as described in the “Anti-NOVX Antibodies” section below. For example the disclosed NOV9 protein have multiple hydrophilic regions, each of which can be used as an immunogen. In one embodiment, contemplated NOV9 epitope is from about amino acids 40 to 70. In another embodiment, the comtemplated NOV9 epitope is from about amino acids 80 to 110. In further embodiments, the contemplated NOV9 epitope is from about amino acids 120 to 200, from about amino acids 220 to 245, from about amino acids 250 to 280, or from about amino acids 290 to 340. This novel protein also has value in development of powerful assay system for functional analysis of various human disorders, which will help in understanding of pathology of the disease and development of new drug targets for various disorders.

[0277] NOV10

[0278] A disclosed NOV10 nucleic acid of 3003 nucleotides (also referred to as AC058790_da25) encoding an alpha-mannosidase-like protein is shown in Table 10A. An open reading frame was identified beginning with an ATG initiation codon at nucleotides 57-59 and ending with a TAA codon at nucleotides 2946-2948. A putative untranslated region upstream from the initiation codon and downstream from the termination codon is underlined in Table 10A. The start and stop codons are in bold letters. Single nucleotide polymorphism data is included in Example 3.

TABLE 10A
NOV10 nucleotide sequence.

(SEQ ID NO:25)

GGTATCATACTCCAGCAAGCGCACATCATCAGTGACGTCGATCACGATGCATCGTCATGGCGGCAGCGCCGTTCTTGAAG
CACTGGCGCACCACTTTTGAGCGGGTGGAGAAGTTCGTGTCCCCGATCTACTTCACCGACTGTAACCTCCGCGGCAGGCT
TTTTGGGGCCAGCTGCCCTGTGGCTGTGCTCTCCAGCTTCCTGACGCCGGAGAGACTTCCCTACCAGGAGGCAGTCCAGC
GGGACTTCCGCCCCGCGCAGGTCGGCGACAGCTTCGGACCCACATGGTGGACCTGCTGGTTCCGGGTGGAGCTGACCATC
CCAGAGGCATGGGTGGGCCAGGAAGTTCACCTTTGCTGGGAAAGTGATGGAGAAGGTCTGGTGTGGCGTGATGGAGAACC
TGTCCAGGGTTTAACCAAAGAGGGTGAGAAGACCAGCTATGTCCTGACTGACAGGCTGGGGGAAAGAGACCCCCGAAGCC
TCACTCTCTATGTGGAAGTAGCCTGCAATGGGCTCCTGGGGGCCGGGAAGGGAAGCATGATTGCAGCCCCTGACCCTGAG
AAGATGTTCCAGCTGAGCCGGGCTGAGCTAGCTGTGTTCCACCGGGATGTCCACATGCTCCTGGTGGATCTGGAGCTGCT
GCTGGGCATAGCCAAGGCGCAGCAGCTGGAATGGGTGAAGAGCCGCTACCCTGGCCTGTACTCCCGCATCCAGGAGTTTG
CGTGCCGTGGGCAGTTTGTGCCTGTGGGGGGCACCTGGGTGGAGATGGATGGGAACCTGCCCAGTGGAGAGGCCATGGTG
AGGCAGTTTTTGCAGGGCCAGAACTTCTTTCTGCAGGAGTTTGGGAAGATGTGCTCTGAGTTCTGGCTGCCGGACACCTT
TGGCTACTCAGCACAGCTCCCCCAGATCATGCACGGCTGTGGCATCAGGCGCTTTCTCACCCAGAAATTGAGCTGGAATT
TGGTGAACTCCTTCCCACACCATACATTTTTCTGGGAGGGCCTGGATGGCTCCCGTGTACTGGTCCACTTCCCACCTGGC
GACTCCTATGGGATGCAGGGCAGCGTGGAGGAGGTGCTGAAGACCGTGGCCAACAACCGGGACAAGGGGCGGGCCAACCA
CAGTGCCTTCCTCTTTGGCTTTGGGGATGGGGGTGGTGGCCCCACCCAGACCATGCTGGACCGCCTGAAGCGCCTGAGCA
ATACGGATGGGCTGCCCAGGGTGCAGCTATCTTCTCCAAGACAGCTCTTCTCAGCACTGGAGAGTGACTCAGAGCAGCTG
TGCACGTGGGTTGGGGAGCTCTTCTTGGAGCTGCACAATGGCACATACACCACCCATGCCCAGATCAAGAAGGGGAACCG
GGAATGTGAGCGGATCCTGCACGACGTGGAGCTGCTCAGTAGCCTGGCCCTGGCCCGCAGTGCCCAGTTCCTATACCCAG
CAGCCCAGCTGCAGCACCTCTGGAGGCTCCTTCTTCTGAACCAGTTCCATGATGTGGTGACTGGAAGCTGCATCCAGATG
GTGGCAGAGGAAGCCATGTGCCATTATGAAGACATCCGTTCCCATGGCAATACACTGCTCAGCGCTGCAGCCGCAGCCCT
GTGTGCTGGGGAGCCAGGTCCTGAGGGCCTCCTCATCGTCAACACACTGCCCTGGAAGCGGATCGAAGTGATGGCCCTGC
CCAAACCGGGCGGGGCCCACAGCCTAGCCCTGGTGACAGTGCCCAGCATGGGCTATGCTCCTGTTCCTCCCCCCACCTCA
CTGCAGCCCCTGCTGCCCCAGCAGCCTGTGTTCGTAGTGCAAGAGACTGATGGCTCCGTGACTCTGGACAATGGCATCAT
CCGAGTGAAGCTGGACCCAACTGGTCGCCTGACGTCCTTGGTCCTGGTGGCCTCTGGCAGGGAGGCCATTGCTGAGGGCG
CCGTGGGGAACCAGTTTGTGCTATTTGATGATGTCCCCTTGTACTGGGATGCATGGGACGTCATGGACTACCACCTGGAG
ACACGGAAGCCTGTGCTGGGCCAGGCAGGGACCCTGGCAGTGGGCACCGAGGGCGGCCTGCGGGGCAGCGCCTGGTTCTT
GCTACAGATCAGCCCCAACAGTCGGCTTAGCCAGGAGGTTGTGCTGGACGTTGGCTGCCCCTATGTCCGCTTCCACACCG
AGGTACACTGGCATGAGGCCCACAAGTTCCTGAAGGTGGAGTTCCCTGCTCGCGTGCGGAGTTCCCAGGCCACCTATGAG
ATCCAGTTTGGGCACCTGCAGCGACCTACCCACTACAATACCTCTTGGGACTGGGCTCGATTTGAGGTGTGGGCCCATCG
CTGGATGGATCTGTCAGAACACGGCTTTGGGCTGGCCCTGCTCAACGACTGCAAGTATGGCGCGTCAGTGCGAGGCAGCA
TCCTCAGCCTCTCGCTCTTGCGGGCGCCTAAAGCCCCGGACGCTACTGCTGACACGGGGCGCCACGAGTTCACCTATGCA
CTGATCTTCAGCAAGGGCTCTTTCCAGGATGCTGGCGTTATCCAAGCTGCCTACAGCCTAAACTTCCCCCTGTTGGCTCT
GCCAGCCCCCAGCCCAGCGCCCGCCACCTCCTGGAGTGCGTTTTCCGTGTCTTCACCCGCGGTCGTATTGGAGACCGTCA
AGCAGGCGGAGAGCAGCCCCCAGCGCCGCTCGCTGGTCCTGAGGCTGTATGAGGCCCACGGCAGCCACGTGGACTGCTGG
CTGCACTTGTCGCTGCCGGTTCAGGAGGCCATCCTCTGCGATCTCTTGGAGCGACCAGACCCTGCTGGCCACTTGACTTC
GGGACAACCGCCTGAAGCTCACCTTTTCTCCCTTCCAAGTGCTGTCCCTGTTGCTCGTGCTTCAGCCTCCGCCACACTGA
GTCCCTGGGGCTGGGGTTTTGTTTGTAGAAGGCTCTGGGGACTCCTAATTTCTGCTTCCCCAGCCTAAAGCAGGGATCAG
TCTTTTCTTGTGGAATAAATCCTTGGATCGGGAAAAAAAAAAA

[0279] In a search of public sequence databases, the NOV10 nucleic acid sequence, located on chromsome 15 has 2371 of 2390 bases (99%) identical to a alpha-mannosidase mRNA from Homo sapiens, (GENBANK-ID: AF044414|acc: AF044414.2) (E=0.0). Public nucleotide databases include all GenBank databases and the GeneSeq patent database.

[0280] The disclosed NOV10 polypeptide (SEQ ID NO: 26) encoded by SEQ ID NO: 25 has 963 amino acid residues and is presented in Table 10B using the one-letter amino acid code. Signal P. Psort and/or Hydropathy results predict that NOV10 does not have a signal peptide and is likely to be localized in the peroxisome (microbody) with a certainty of 0.7480. In other embodiments, NOV10 is also likely to be localized to the mitochondrial membrane space with a certainty of 0.4539, to the mitochondrial intermembrane space with a certainty of 0.4027, or to the lysosome (lumen) with a certainty of 0.2317.

TABLE 10B
Encoded NOV10 protein sequence.

(SEQ ID NO:26)

MAAAPFLKHWRTTFERVEKFVSPIYFTDCNLRGRLFGASCPVAVLSSFLTPERLPYQEAVQRDFRPAQVGDS
FGPTWWTCWFRVELTIPEAWVGQEVHLCWESDGEGLVWRDGEPVQGLTKEGEKTSYVLTDRLGERDPRSLTL
YVEVACNGLLGAGKGSMIAAPDPEKMFQLSRAELAVFHRDVHMLLVDLELLLGIAKAQQLEWVKSRYPGLYS
RIQEFACRGQFVPVGGTWVEMDGNLPSGEAMVRQFLQGQNFFLQEFGKMCSEFWLPDTFGYSAQLPQIMHGC
GIRRFLTQKLSWNLVNSFPHHTFFWEGLDGSRVLVHFPPGDSYGMQGSVEEVLKTVANNRDKGRANHSAFLF
GFGDGGGGPTQTMLDRLKRLSNTDGLPRVQLSSPRQLFSALESDSEQLCTWVGELFLELHNGTYTTHAQIKK
GNRECERILHDVELLSSLALARSAQFLYPAAQLQHLWRLLLLNQFHDVVTGSCIQMVAEEAMCHYEDIRSHG
NTLLSAAAAALCAGEPGPEGLLIVNTLPWKRIEVMALPKPGGAHSLALVTVPSMGYAPVPPPTSLQPLLPQQ
PVFVVQETDGSVTLDNGIIRVKLDPTGRLTSLVLVASGREAIAEGAVGNQFVLFDDVPLYWDAWDVMDYHLE
TRKPVLGQAGTLAVGTEGGLRGSAWFLLWISPNSRLSQEVVLDVGCPYVRFHTEVHWHEAHKFLKVEFPARV
RSSQATYEIQFGHLQRPTHYNTSWDWARFEVWAHRWMDLSEHGFGLALLNDCKYGASVRGSILSLSLLRAPK
APDATADTGRHEFTYALMPHKGSFQDAGVIQAAYSLNFPLLALPAPSPAPATSWSAFSVSSPAVVLETVKQA
ESSPQRRSLVLRLYEAHGSHVDCWLHLSLPVQEAILCDLLERPDPAGHLTSGQPPEAHLFSLPSAVPVARAS
ASATLSPWGWGFVCRRLWGLLISASPA

[0281] A search of sequence databases reveals that the NOV10 amino acid sequence has 764 of 771 amino acid residues (99%) identical to, and 767 of 771 amino acid residues (99%) similar to, the 1062 amino acid residue alpha-mannosidase protein from Homo sapiens (Q9UL64) (E=0.0). Public amino acid databases include the GenBank databases, SwissProt, PDB and PIR.

[0282] NOV10 was derived from a pool of the following tissues: Adrenal gland, bone marrow, brain—amygdala, brain—cerebellum, brain—hippocampus, brain—substantia nigra, brain—thalamus, brain—whole, fetal brain, fetal kidney, fetal liver, fetal lung, heart, kidney, lymphoma—Raji, mammary gland, pancreas, pituitary gland, placenta, prostate, salivary gland, skeletal muscle, small intestine, spinal cord, spleen, stomach, testis, thyroid, trachea, uterus, Bone, Cervix, Chorionic Villus, Colon, Liver, Lung, Lymph node, Lymphoid tissue, Ovary, Peripheral Blood, Skin, Stomach, Tonsils, Whole Organism. Thus, it is expressed in at least some of the above tissues. This information was derived by determining the tissue sources of the sequences that were included in the invention including but not limited to SeqCalling sources, Public EST sources, Genomic Clone sources, Literature sources, and/or RACE sources.

[0283] The disclosed NOV10 polypeptide has homology to the amino acid sequences shown in the BLASTP data listed in Table 10C.

TABLE 10C
BLAST results for NOV10

| | | Length | Identity | Positives | |
|---|---|---|---|---|---|
| Gene Index/Identifier | Protein/Organism | (aa) | (%) | (%) | Expect |
| ptnr: SPTREMBL- | ALPHA MANNOSIDASE | 1062 | 763/771 | 767/771 | 0.0 |
| ACC: Q9UL64 | 6A8B - Homo | | (99%) | (99%) | |
| | sapiens | | | | |
| ptnr: SPTREMBL- | HYPOTHETICAL 115.8 | 1040 | 715/722 | 718/722 | 0.0 |
| ACC: Q9NTJ4 | KDA PROTEIN - | | (99%) | (99%) | |
| | Homo sapiens | | | | |
| ptnr: TREMBLNEW- | SIMILAR TO | 1039 | 635/730 | 692/730 | 0.0 |
| ACC: AAH16253 | MANNOSIDASE, | | (89%), | (94%) | |
| | ALPHA, CLASS 2C, | | | | |
| | MEMBER 1 | | | | |
| ptnr: SWISSPROT- | Alpha-mannosidase | 1040 | 625/731 | 661/731 | 0.0 |
| ACC: P21139 | (EC 3.2.1.24) | | (85%) | (90%) | |
| ptnr: SPTREMBL- | ALPHA-MANNOSIDASE - | 425 | 425/425 | 425/425 | 0.0 |
| ACC: Q13358 | Homo sapiens | | (100%) | (100%) | |

[0284] The homology between these and other sequences is shown graphically in the ClustalW analysis shown in Table 10D. In the ClustalW alignment of the NOV10 protein, as well as all other ClustalW analyses herein, the black outlined amino acid residues indicate regions of conserved sequence (i.e., regions that may be required to preserve structural or functional properties), whereas non-highlighted amino acid residues are less conserved and can potentially be altered to a much broader extent without altering protein structure or function.

[image]

[image]

[0285] Table 10E lists the domain description from DOMAIN analysis results against NOV10. This indicates that the NOV10 sequence has properties similar to those of other proteins known to contain this domain.

TABLE 10E
Domain Analysis of NOV10

| Model | Description | Score | E−value |
|---|---|---|---|
| Glyco_hydro_38 (InterPro) | Glycosyl hydrolases family 38 | 140.5 | 1e−39 |
| (SEQ ID NO:111) | | | |

Glyco_hydro_38: domain 1 of 2, from 230 to 332:
score 89.2, E = 5.4e−25

| | | | |
|---|---|---|---|
| | | *->vtGGWVMnDEAttHyedlIdQlteGHqfLeenfGsdvkPkvgWsIDP | |
| | | \|+\|+\|\|+ \| + +++\|++++\|++ \|+ \|+ ++\|\| + +\|++\|+ | |
| AC058790_d | 230 | VGGTWVEMDGNLPSGEAMVRQFLQGQNFFLQEFT--KMCSEFWLPDT | 274 |
| | | FGHSatmPyLlraqaGfdgflIgRihYadKksfaetkqleFvWRqswslt | |
| | | \|\|+\|\|++\|++ + \|+ +\|\|+\|++++++ +\|\|++++ \|+\| \|+ | |
| AC058790_d | 275 | FGYSAQLPQIM-HGCGIRRFLTQKLSWNLVNSFPHHT---FFWE---GLD | 317 |
| | | gstdlfthmmpfysYd<-* | |
| | | \|\| +++\| +\| +\|\|+ | |
| AC058790_d | 318 | GS-RVLVHFPPGDSYG 332 | |

Glyco_hydro_38: domain 2 of 2, from 410 to 490;
score 49.2, E = 1.7e−13

| | | | |
|---|---|---|---|
| | | *->pYAdepdeGKPeYWTGYFTSRPalKrldRqlehlLrsaEilatqlsv | |
| | | ++ +\|++ \| + \|++\|++++ \|+ +\|++\| \|+++\|+\|++++ + | |
| AC058790_d | 410 | TWVGELFL---ELHNGTYTTHAQIKKGNRECERILHDVELLSSLALA | 453 |
| | | laggskiegsyAiKleklyeqleelRralaLfQHHDAiTGTakghVv<-* | |
| | | +++++ + \|\|+ \|+\| \|+\|+\|+\|\|++\|\|+++\|+\|+ | |
| AC058790_d | 454 | RS-AQFLYPA-----A----QLQHLWRLLLLNQFHDVVTGSCIQMVA | 490 |

[0286] Glycosyl hydrolases are key enzymes of carbohydrate metabolism. Lysosomal alpha-mannosidase is necessary for the catabolism of N-linked carbohydrates released during glycoprotein turnover. The enzyme catalyzes the hydrolysis of terminal, non-reducing alpha-D-mannose residues in alpha-D-mannosides, and can cleave all known types of alpha-mannosidic linkages. While alpha-mannosidases were classified as enzymes that process newly formed N-glycans or degrade mature glycoproteins, two endoplasmic reticulum (ER) alpha-mannosidases with previously assigned processing roles, have important catabolic activities. The ER/cytosolic mannosidase may be involved in the degradation of dolichol intermediates that are not needed for protein glycosylation, whereas the soluble form of Man9-mannosidase is responsible for the degradation of glycans on defective or malfolded proteins that are specifically retained and broken down in the ER. The degradation of oligosaccharides derived from dolichol intermediates by ER/cytosolic mannosidase explains why cats and cattle with alpha-mannosidosis store and excrete some unexpected oligosaccharides containing only one GlcNAc residue. Similarly, the action of ER/cytosolic mannosidase, followed by the action of the recently described human lysosomal alpha(1→6)-mannosidase, together explain why alpha-mannosidosis patients store and excrete large amounts of oligosaccharides that resemble biosynthetic intermediates, rather than partially degraded glycans. The relative contributions of the lysosomal and extra-lysosomal catabolic pathways can be derived by comparing the ratio of trisaccharide Man beta (1→4)GlcNAc beta (1→4)GlcNAc to disaccharide Man beta (1→4)GlcNAc accumulated in tissues from goats with beta-mannosidosis. A similar determination in human beta-mannosidosis patients is not possible because the same intermediate, Man beta (1→4)-GlcNAc is a product of both pathways. Based on inhibitor studies with pyranose and furanose analogues, alpha-mannosidases may be divided into two groups. Those in Class 1 are (1→2)-specific enzymes like Golgi mannosidase I, whereas those in Class 2, like lysosomal alpha-mannosidase, can hydrolyse (1→2), (1→3) and (1→6) linkages. A similar classification has been derived from protein sequence homologies. It is possible to speculate about their probable evolution from two primordial genes. The first would have been a Class 1 ER enzyme involved in the degradation of glycans on incompletely assembled or malfolded glycoproteins. The second would have been a Class 2 lysosomal enzyme responsible for turnover. Later, other alpha-mannosidases, with new processing or catabolic functions, would have developed from these, by loss or gain of critical insertion or retention sequences, to yield the full complement of alpha-mannosidases known today (Glycobiology October 1994 ;4(5):551-66). Defects in the lysosomal alpha-mannosidase gene cause lysosomal alpha-mannosidosis (AM), a lysosomal storage disease characterized by the accumulation of unbranched oligo-saccharide chains. Depending on the clinical findings at the age of onset, a severe infantile (type I) and a mild juvenile (type II) form of alpha-mannosidosis are recognized. Furthermore, variability in clinical expression of the disease is seen within each type. Some of the disease features are: susceptibility to infection, vomiting, coarse features, macroglossia, flat nose, large clumsy ears, widely spaced teeth, large head, big hands and feet, tall stature, slight hepatosplenomegaly, muscular hypotonia, lumbar gibbus, radiographic skeletal abnormalities, dilated cerebral ventricles, lenticular opacities, hypogammaglobulinemia, ‘storage cells’ in the bone marrow, and vacuolated lymphocytes in the bone marrow and blood.

[0287] The disclosed NOV10 nucleic acid of the invention encoding a Alpha-mannosidase-like protein includes the nucleic acid whose sequence is provided in Table 10A or a fragment thereof. The invention also includes a mutant or variant nucleic acid any of whose bases may be changed from the corresponding base shown in Table 10A while still encoding a protein that maintains its Alpha-mannosidase-like activities and physiological functions, or a fragment of such a nucleic acid. The invention further includes nucleic acids whose sequences are complementary to those just described, including nucleic acid fragments that are complementary to any of the nucleic acids just described. The invention additionally includes nucleic acids or nucleic acid fragments, or complements thereto, whose structures include chemical modifications. Such modifications include, by way of nonlimiting example, modified bases, and nucleic acids whose sugar phosphate backbones are modified or derivatized. These modifications are carried out at least in part to enhance the chemical stability of the modified nucleic acid, such that they may be used, for example, as antisense binding nucleic acids in therapeutic applications in a subject. In the mutant or variant nucleic acids, and their complements, up to about 2 percent of the bases may be so changed.

[0288] The disclosed NOV10 protein of the invention includes the Alpha-mannosidase-like protein whose sequence is provided in Table 10B. The invention also includes a mutant or variant protein any of whose residues may be changed from the corresponding residue shown in Table 10B while still encoding a protein that maintains its Alpha-mannosidase-like activities and physiological functions, or a functional fragment thereof. In the mutant or variant protein, up to about 1 percent of the residues may be so changed.

[0289] The protein similarity information, expression pattern, and map location for the alpha-mannosidase-like protein and the NOV10 protein disclosed herein suggest that this alpha-mannosidase-like protein may have important structural and/or physiological functions characteristic of the mannosidase protein family. Therefore, the nucleic acids and proteins of the invention are useful in potential diagnostic and therapeutic applications and as a research tool. These applications include serving as a specific or selective nucleic acid or protein diagnostic and/or prognostic marker, wherein the presence or amount of the nucleic acid or the protein are to be assessed, as well as potential therapeutic applications such as the following: (i) a protein therapeutic, (ii) a small molecule drug target, (iii) an antibody target (therapeutic, diagnostic, drug targeting/cytotoxic antibody), (iv) a nucleic acid useful in gene therapy (gene delivery/gene ablation), and (v) a composition promoting tissue regeneration in vitro and in vivo (vi) biological defense weapon.

[0290] The NOV10 nucleic acids and proteins of the invention are useful in potential diagnostic and therapeutic applications implicated in various diseases and disorders described below and/or other pathologies. For example, the compositions of the present invention will have efficacy for treatment of patients suffering from alpha-mannosidosis, beta-mannosidosis, other storage disorders, peroxisomal disorders such as zellweger syndrome, infantile refsum disease, rhizomelic chondrodysplasia (chondrodysplasia punctata, rhizomelic), and hyperpipecolic acidemia and other diseases, disorders and conditions of the like. Since mannosidoses are found not only in humans, but also in animals, the nucleic acids and proteins of the this invention may be useful in treating animals with mannosidoses or other storage diseases, and other diseases, disorders and conditions of the like. Additionally, the compositions of the present invention may have efficacy for treatment of patients suffering from conditions associated with the role of GRK2 in brain and in the regulation of chemokine receptors.. The NOV10 nucleic acid, or fragments thereof, may further be useful in diagnostic applications, wherein the presence or amount of the nucleic acid or the protein are to be assessed.

[0291] NOV10 nucleic acids and polypeptides are further useful in the generation of antibodies that bind immunospecifically to the novel substances of the invention for use in therapeutic or diagnostic methods. These antibodies may be generated according to methods known in the art, using prediction from hydrophobicity charts, as described in the “Anti-NOVX Antibodies” section below. For example the disclosed NOV10 protein have multiple hydrophilic regions, each of which can be used as an immunogen. In one embodiment, contemplated NOV10 epitope is from about amino acids 5 to 20. In another embodiment, the comtemplated NOV10 epitope is from about amino acids 40 to 80. In further embodiments, the contemplated NOV10 epitope is from about amino acids 110 to 180, from about amino acids 200 to 230, from about amino acids 300 to 370, from about amino acids 375 to 450, from about amino acids 650 to 680, from about amino acids 690 to 770, from about amino acids 790 to 820, from about amino acids 850 to 880, or from about amino acids 900 to 920. This novel protein also has value in development of powerful assay system for functional analysis of various human disorders, which will help in understanding of pathology of the disease and development of new drug targets for various disorders.

[0292] NOV11

[0293] NOV11 includes three novel C1q-related factor-like proteins disclosed below. The disclosed sequences have been named NOV11a, NOV11b, and NOV11c. Single nucleotide polymorphism data is discussed below in Example 4.

[0294] NOV11a

[0295] A disclosed NOV11a nucleic acid of 805 nucleotides (also referred to as GM57107065_da1) encoding an C1q-related factor-like protein is shown in Table 11A. An open reading frame was identified beginning with an ATG initiation codon at nucleotides 83-85 and ending with a TGA codon at nucleotides 797-799. Putative untranslated regions are upstream from the initiation codon and downstream from the termination codon.

TABLE 11A
NOV11a nucleotide sequence.

(SEQ ID NO:27)

GAGTGAGGAAGATTTGCTGGCCCTGGCAGCGTCGCGGCTGAGCCGCCGCAAGAGGGTGGCGGGCGCGGCCGTCGGAGTGG
CCATGGTGCTGCTGCTGCTGGTGGCCATCCCGCTGCTGGTGCACAGCTCCCGCGGGCCAGCGCACTACGAGATGCTGGGT
CGCTGCCGCATGGTGTGCGACCCGCATGGGCCCCGTGGCCCTGGTCCGGACGGCGCGCCTGCTTCCGTGCCCCCCTTCCC
GCCAGGCGCCAAGGGAGAGGTGGGCCGGTGCGGGAAAGCAGGCCTGAGGGGGCCCCCTGGACCACCAGGTCCAAGAGGGC
CCCCAGGAGAACCCGGCAGGCCAGGCCCCCCGGGCCCTCCCGGTCCAGGTCCGGGCGGGGTGGCGCCCGCTGCCGGCTAC
GTGCCTCGCATTGCTTTCTACGCGGGCCTGCGGCGGCCCCACGAGGGTTACGAGGTGCTGCGCTTCGACGACGTGGTGAC
CAACGTGGGCAACGCCTACGAGGCAGCCAGCGGCAAGTTTACTTGCCCCATGCCAGGCGTCTACTTCTTCGCTTACCACG
TGCTCATGCGCGGCGGCGACGGCACCAGCATGTGGGCCGACCTCATGAAGAACGGACAGGTCCGGGCCAGCGCCATTGCT
CAGGACGGGGACCAGAACTACGACTACGCCAGCAACAGCGTCATTCTGCACCTGGACGTGGGCGACGAGGTCTTCATCAA
GCTGGACCCCGGGAAAGTGCACGGCGGCAACACCAACAAGTACAGCACCTTCTCCGGCTTCATCATCTACCCCGACTGAG
CCGGC

[0296] In a search of public sequence databases, the NOV11a nucleic acid, located on chromsome 12, has 565 of 787 bases (71%) identical to a C1q-related factor mRNA from Homo sapiens, (GENBANK-ID: AF095154) (E=9.9e⁻⁶⁸). Public nucleotide databases include all GenBank databases and the GeneSeq patent database.

[0297] The disclosed NOV11a polypeptide (SEQ ID NO: 28) encoded by SEQ ID NO: 27 has 238 amino acid residues and is presented in Table 11B using the one-letter amino acid code. Signal P, Psort and/or Hydropathy results predict that NOV11a has a signal peptide and is likely to be localized extracellularly with a certainty of 0.5374. In other embodiments, NOV11a is also likely to be localized to the microbody (peroxisome) with a certainty of 0.1111, to the endoplasmic reticulum (membrane) with a certainty of 0.1000, and to the endoplasmic reticulum (lumen) with a certainty of 0.1000. The most likely cleavage site for NOV11a is between positions 15 and 16: VHS-SR.

TABLE 11b
Encoded NOV11a protein sequence.

(SEQ ID NO:28)

MVLLLLVAIPLLVHSSRGPAHYEMLGRCRMVCDPHGPRGPGPDGAPASVP
PFPPGAKGEVGRCGKAGLRGPPGPPGPRGPPGEPGRPGPPGPPGPGPGGV
APAAGYVPRIAFYAGLRRPHEGYEVLRFDDVVTNVGNAYEAASGKFTCPM
PCVYFFAYHVLMRGGDGTSMWADLMKNGQVRASAIAQDADQNYDYASNSV
ILHLDVGDEVFIFLDGGKVGNINKYSTFSGGFIIYPD

[0298] A search of sequence databases reveals that the NOV11a amino acid sequence has 184 of 258 amino acid residues (71%) identical to, and 198 of 258 amino acid residues (76%) similar to, the 258 amino acid residue C1q-related factor precursor protein from Homo sapiens (075973) (E=9.1 e⁻⁹¹). Public amino acid databases include the GenBank databases, SwissProt, PDB and PIR.

[0299] NOV11a is specifically expressed in the following tissues: brain, heart, testis, kidney, thyroid, prostate, fetal kidney, fetal skletal. It shows increased expression in cancer cell lines derived from the following tissue: colon, kidney, ovary, skin, brain. It is highly upregulated in IFN-gamma treated endothelial cells. This information was derived by determining the tissue sources of the sequences that were included in the invention including but not limited to SeqCalling sources and Taqman results.

[0300] NOV11b

[0301] A disclosed NOV11b nucleic acid of 805 nucleotides (also referred to as CG54503-02) encoding a novel C1q-related factor-like protein is shown in Table 11C. An open reading frame was identified beginning with an ATG initiation codon at nucleotides 83-85 and ending with a TGA codon at nucleotides 797-799. Putative untranslated regions are underlined and are found upstream from the initiation codon and downstream from the termination codon.

TABLE 11C
+HZ,50
NOV11b nucleotide sequence.

(SEQ ID NO:29)

GAGTGAGGAAGATTTGCTGGCCCTGGCAGCGTCGCGGCTGAGCCGCCGCAAGAGGGTGGCGGGCGCGGCCGTCGGAGTGG
CCATGGTGCTGCTGCTGCTGGTGGCCATCCCGCTGCTGGTGCACAGCTCCCGCGGGCCAGCGCACTACGAGATGCTGGGT
CGCTGCCGCATGGTGTGCGACCCGCATGGGCCCCGTGGCCCTGGTCCGGACGGCGCGCCTGCTTCCGTGCCCCCCTTCCC
GCCAGGCGCCAAGGGAGAGGTGGGCCGGCGCGGGAAAGCAGGCCTGCGGGGGCCCCCTGGACCACCAGGTCCAAGAGGGC
CCCCAGGAGAACCCGGCAGGCCAGGCCCCCCGGGCCCTCCCGGTCCAGGTCCGGGCGGGGTGGCGCCCGCTGCCGGCTAC
GTGCCTCGCATTGCTTTCTACGCGGGCCTGCGGCGGCCCCACGAGGGTTACGAGGTGCTGCGCTTCGACGACGTGGTGAC
CAACGTGGGCAACGCCTACGAGGCAGCCAGCGGCAAGTTTACTTGCCCCATGCCAGGCGTCTACTTCTTCGCTTACCACG
TGCTCATGCGCGGCGGCGACGGCACCAGCATGTGGGCCGACCTCATGAAGAACGGACAGGTCCGGGCCAGCGCCATTGCT
CAGGACGCGGACCAGAACTACGACTACGCCAGCAACAGCGTCATTCTGCACCTGGACGTGGGCGACGAGGTCTTCATCAA
GCTGGACGGCGGGAAAGTGCACGGCGGCAACACCAACAAGTACAGCACCTTCTCCGGCTTCATCATCTACCCCGACTGAG
CCGGC

[0302] In a search of public sequence databases, the NOV11a nucleic acid, located on chromsome 17q21, has 565 of 787 bases (71%) identical to a C1q-related factor mRNA from Homo sapiens, (GENBANK-ID: AF095154) (E=1.9e⁻⁶⁸). Public nucleotide databases include all GenBank databases and the GeneSeq patent database.

[0303] The disclosed NOV11b polypeptide (SEQ ID NO: 30) encoded by SEQ ID NO: 29 has 238 amino acid residues and is presented in Table 11D using the one-letter amino acid code.

[0304] The SignalP, Psort and/or Hydropathy profile for NOV11b predict that this sequence has a signal peptide and is likely to be localized extracellularly with a certainty of 0.5374, as expected by a protein similar to the C1q complement component. In other embodiments, NOV11b is also likely to be localized to the microbody (peroxisome) with a certainty of 0.1199, to the endoplasmic reticulum (membrane) with a certainty of 0.1000, and to the endoplasmic reticulum (lumen) with a certainty of 0.1000. The most likely cleavage site for NOV11b is between positions 15 and 16: VHS-SR.

TABLE 11D
Encoded NOV11b protein sequence.

(SEQ ID NO:30)

MVLLLLVAIPLLVHSSRGPAHYEMLGRCRMVCDPHGPRGPGPDGAPASVP
PFPPGAKGEVGRRGKAGLRGPPGPPGPRGPPGEPGRPGPPGPPGPGPGGV
APAAGYVPRIAFYAGLRRPHEGYEVLRFDDVVTNVGNAYEAASGKFTCPM
PGVYFFAYHVLMRGGDGTSMWADLMKNGQVRASAIAQDADQNYDYASNSV
ILHLDVGDEVFIKLDGGKVHGGNTNKYSTFSGFIIYPD

[0305] A search of sequence databases reveals that the NOV11b amino acid sequence has 184 of 258 amino acid residues (71%) identical to, and 198 of 258 amino acid residues (76%) similar to, the 258 amino acid residue C1q-related factor precursor protein from Homo sapiens (075973) (E=7.1 e⁻⁹¹). Public amino acid databases include the GenBank databases, SwissProt, PDB and PIR.

[0306] NOV11b is expressed in at least some of the following tissues: adrenal gland, bone marrow, brain—amygdala, brain—cerebellum, brain—hippocampus, brain—substantia nigra, brain—thalamus, brain—whole, fetal brain, fetal kidney, fetal liver, fetal lung, heart, kidney, lymphoma—Raji, mammary gland, pancreas, pituitary gland, placenta, prostate, salivary gland, skeletal muscle, small intestine, spinal cord, spleen, stomach, testis, thyroid, trachea, uterus, right cerebellum. This information was derived by determining the tissue sources of the sequences that were included in the invention including but not limited to SeqCalling sources, Public EST sources, Literature sources, and/or RACE sources.

[0307] The disclosed NOV11a polypeptide has homology to the amino acid sequences shown in the BLASTP data listed in Table 11E.

TABLE 11E
BLAST results for NOV11a

| Gene Index/ | | Length | Identity | | |
|---|---|---|---|---|---|
| Identifier | Protein/Organism | (aa) | (%) | Positives (%) | Expect |
| Ptnr: SWISSPROT-ACC: | C1q-related | 258 | 184/258 | 198/258 | 9.1e−91 |
| 075973 | factor precursor - | | (71%) | (76%) | |
| | Homo sapiens | | | | |
| ptnr: SWISSPROT- | C1q-related | 258 | 156/216 | 166/216 | 1.8e−78 |
| ACC: O88992 | factor precursor - | | (72%) | (76%) | |
| | Mus musculus | | | | |
| ptnr: SWISSPROT- | Gliacolin | 155 | 153/209 | 165/209 | 1.3e−77 |
| ACC: Q9ESN4 | precursor - Mus | | (73%) | (78%) | |
| | musculus | | | | |
| ptnr: SWISSPROT- | Complement C1q | 251 | 90/239 | 124/239 | 1.3e−29 |
| ACC: P02746 | subcomponent | | (37%) | (51%) | |
| ptnr: TREMBLNEW- | COMPLEMENT | 253 | 90/239 | 124/239 | 1.3e−29 |
| ACC: AAH08983 | COMPONENT 1 | | (37%) | (51%) | |

[0308] The homology between these and other sequences is shown graphically in the ClustalW analysis shown in Table 11F. In the ClustalW alignment of the NOV11 protein, as well as all other ClustalW analyses herein, the black outlined amino acid residues indicate regions of conserved sequence (i.e., regions that may be required to preserve structural or functional properties), whereas non-highlighted amino acid residues are less conserved and can potentially be altered to a much broader extent without altering protein structure or function. V,36/2

[0309] Tables 11E-11F list the domain descriptions from DOMAIN analysis results against NOV11. This indicates that the NOV11 sequence has properties similar to those of other proteins known to contain this domain.

TABLE 11E
Domain Analysis of NOV11

gnl|Smart|smart00110, C1Q, Complement component Clq domain.; Globular
domain found in many collagens and eponymously in complement Clq. When
part of full length proteins these domains form a bouquete due to the
multimerization of heterotrimers. The Clq fold is similar to that of
tumour necrosis factor. (SEQ ID NO:104)
CD-Length = 132 residues, 99.2% aligned
Score = 113 bits (283), Expect = 1e−26

| | | | |
|---|---|---|---|
| Query: | 108 | PRIAFYAGL--RRPHEGYEVLRFDDVVTNVGNAYEAASGKFTCPMPGVYFFAYHVLMRGG | 165 |
| | | \|\| \|\| \|\| + +\|\|\| \|+ \| \|+ ++\|\|\|\|\|\|+\|\|\|\|+51 +\|\|+ 30 | |
| Sbjct: | 2 | PRSAFSVIRSTNRPPPPGQPVRFDKVLYNQQGHYDPSTGKFTCPVPGVYYFSYHIESK-- | 59 |
| Query: | 166 | DGTSMWADLMKNGQVRASAIAQDADQNYDYASNSVILHLDVGDEVFIKLDGGKVHG-GNT | 224 |
| | | \| ++ \|\|\|\|\| + \| \|\| +\| \| \|\|+\|+++\|\| \| | |
| Sbjct: | 60 | -GRNVKVSLMKNGIQVMRECDEYQKGLYQVASGGALLQLRQGDQVWLELDDKKNGLYAGE | 118 |
| Query: | 225 | NKYSTFSGFIIYPD 238 | |
| | | \|\|\|\|\|\|+++\|\| | |
| Sbjct: | 119 | EVDSTFSGFLLFPD 132 | |

[0310] TABLE 11F
Domain Analysis of NOV11

gnl|Pfam|pfam00386, Clq, Clq domain. Clq is a subunit of the C1 enzyme
complex that activates the serum complement system. (SEQ ID NO:112)
CD-Length = 125 residues, 100.0% aligned
Score = 102 bits (253), Expect =3e−23

| | | | |
|---|---|---|---|
| Query: | 111 | AFYAGLR-RPHEGYEVLRFDDVVTNVGNAYEAASGKFTCPMPGVYFFAYHVLMRGGDGTS | 169 |
| | | \|\| \| \|\| + + \|\|+\|+ \| \|+ \|+\|\|\|\|\|\|+\|\|+\|+\| +\|\| + \|\|+ | |
| Sbjct: | 1 | AFTAIRSTRPPAPGQPVIFDEVLYNQQGHYDPATGKFTCPVPGLYYFNFHVSSK---GTN | 57 |
| Query: | 170 | MWADLMKNGQVRASAIAQDADQNYDYASNSVILHLDVGDEVFIKLDGGKVHG--GNTNKY | 227 |
| | | + \|\|+\|\| \| + \| \| \|\| +\| \| \|\| \|+++\|\| + +\| \| + | 227 |
| Sbjct: | 58 | VCVSLMRNGVPVMSFCDEYAKGTYQVASGGAVLQLRQGDRVWLELDDKQTNGLLGGEGVH | 117 |
| Query: | 228 | STFSGFII 235 | |
| | | \| \|\|\|\|++ | |
| Sbjct: | 118 | SVFSGFLL 125 | |

[0311] The first component of complement system is a calcium-dependent complex of the 3 subcomponents C1q, C1r, and C1s. Subcomponent C1q binds to immunoglobulin complexes with resulting serial activation of C1r (enzyme), C1s (proenzyme) and the other 8 components of complement. It contains collagen like domains. It has been shown that fibronectin binds to C1q in the same manner that it binds collagen. A major function of the fibronectins is in the adhesion of cells to extracellular materials such as solid substrata and matrices. Because fibronectin stimulates endocytosis and promotes the clearance of particulate material from the circulation, the results suggest that fibronectin functions in the clearance of C1q-coated material such as immune complexes or cellular debris. Many examples of deficiencies of C1q have been reported, most of them associated with systemic lupus erythematosus or glomerulonephritis.

[0312] The complement system plays a paradoxical role in the development and expression of autoimmunity in humans. The activation of complement in SLE contributes to tissue injury. In contrast, inherited deficiency of classic pathway components, particularly C1q, is probably associated with the development of SLE. This leads to the hypothesis that a physiologic action of the early part of the classic pathway protects against the development of SLE and implies that C1q may play a key role in this respect. C1q-deficient (C1qa−/−) mice have been shown to have increased mortality and higher titers of autoantibodies, compared with strain-matched controls. Of the C1qa−/− mice, 25% have been shown to have glomerulonephritis with immune deposits and multiple apoptotic cell bodies. Among mice without glomerulonephritis, there were significantly greater numbers of glomerular apoptotic bodies in C1q-deficient mice compared with controls. The phenotype associated with C1q deficiency was modified by background genes. These findings are compatible with the hypothesis that C1q deficiency causes autoimmunity by impairment of the clearance of apoptotic cells.

[0313] The C1q-related factor is a recently discovered protein which has homology to C1q. Since this is a relatively new discovery, very little is known about its function. But conclusions could clearly be derived from it expression pattern and it homology to C1q. Based on its expression pattern it has been suggested that this protein may be involved in motor function. The functions of C1q has been described above and include role in binding to immunoglobulin complexes, cell adhesion, autoimmunity and apoptosis, among others.

[0314] The disclosed NOV11 nucleic acid of the invention encoding a C1q-related factor-like protein includes the nucleic acid whose sequence is provided in Table 11A, 11C, or a fragment thereof. The invention also includes a mutant or variant nucleic acid any of whose bases may be changed from the corresponding base shown in Table 11A or 11C while still encoding a protein that maintains its C1q-related factor-like activities and physiological functions, or a fragment of such a nucleic acid. The invention further includes nucleic acids whose sequences are complementary to those just described, including nucleic acid fragments that are complementary to any of the nucleic acids just described. The invention additionally includes nucleic acids or nucleic acid fragments, or complements thereto, whose structures include chemical modifications. Such modifications include, by way of nonlimiting example, modified bases, and nucleic acids whose sugar phosphate backbones are modified or derivatized. These modifications are carried out at least in part to enhance the chemical stability of the modified nucleic acid, such that they may be used, for example, as antisense binding nucleic acids in therapeutic applications in a subject. In the mutant or variant nucleic acids, and their complements, up to about 29 percent of the bases may be so changed.

[0315] The disclosed NOV11 protein of the invention includes the C1q-related factor-like protein whose sequence is provided in Table 11B or 11D. The invention also includes a mutant or variant protein any of whose residues may be changed from the corresponding residue shown in Table 11B or 11D while still encoding a protein that maintains its C1q-related factor-like activities and physiological functions, or a functional fragment thereof. In the mutant or variant protein, up to about 29 percent of the residues may be so changed.

[0316] The protein similarity information, expression pattern, and map location for the C1q-related factor-like protein and nucleic acid disclosed herein suggest that this C1q-related factor may have important structural and/or physiological functions characteristic of the C1q family. Therefore, the nucleic acids and proteins of the invention are useful in potential diagnostic and therapeutic applications and as a research tool. These include serving as a specific or selective nucleic acid or protein diagnostic and/or prognostic marker, wherein the presence or amount of the nucleic acid or the protein are to be assessed, as well as potential therapeutic applications such as the following: (i) a protein therapeutic, (ii) a small molecule drug target, (iii) an antibody target (therapeutic, diagnostic, drug targeting/cytotoxic antibody), (iv) a nucleic acid useful in gene therapy (gene delivery/gene ablation), and (v) a composition promoting tissue regeneration in vitro and in vivo (vi) biological defense weapon.

[0317] The nucleic acids and proteins of the invention are useful in potential diagnostic and therapeutic applications implicated in various diseases and disorders described below and/or other pathologies. Based on the TaqMan data, the compositions of the present invention, will have efficacy for treatment of patients suffering from: cancer of the colon, kidney, ovary, skin and brain. Since it is over expressed in cell lines derived from these tissues it can also be used as a diagnostic marker for cancer in these tissues. The expression of the novel gene of this invention upon activation of HUVEC and the homology of the novel protein of this invention to C1q may indicate that it is secreted by endothelial cells in areas of inflammtion where Th1 cells are inflitrating the inflammation site such as Rheumatoid Arthritis and Inflammatory Bowel Disease. Based on its homology to C1q, the novel protein could be either pro-inflammatory activating the complement cascade and be a useful target for a monoclonal antibody to block this effect. Alternatively, this protein may act as a competitor of C1q and so act to down regulate complement mediated damage of endothelial cells. In this case it could be used as a protein therapeutic. IFN gamma also induces production of this protein by airway epithelilial cell lines NCI-H292 and dermal fibroblasts indicating again that it may play a role in Th1 inflammatory diseases such as rheumatoid arthritis, multiple sclerosis, inflammatory bowel diseases and psoriasis and other diseases, disorders and conditions of the like. Because of its high homology to C1q-related factor, this novel protein may also play a role in disorders of the nervous system involved in motor function.

[0318] Based on its homology to C1q, the novel protein of invention may also play a role in the pathogenesis of systemic lupus erythematosus and glomerulonephritis and therefore could be used for detection and treatment of these diseases. Thus this protein may be involved in autoimmunity. Since the novel protein of invention has a Collagen triple helix repeat domain, it is likely that this protein may be involved in collagen related disorders and processes such as but not limited to osteogenesis, rheumatoid arthritis and osteoarthritis.

[0319] Finally, presence of somatotropin-like domain in the novel protein of invention suggests that it may have somatotropin (growth hormone) like function and behave as a growth hormone and be useful in control of growh and development/differentiation related functions such as but not limited maturation, lactation and puberty. Because of the involvement of growth hormone in many different physiologic functions, the novel protein may be involved in causing osteoporosis, obesity, aging and reproductive malfunction and hence could be used in treatment and/or diagnosis of these disorders.

[0320] The NOV11 nucleic acid, or fragments thereof, may further be useful in diagnostic applications, wherein the presence or amount of the nucleic acid or the protein are to be assessed.

[0321] NOV11 nucleic acids and polypeptides are further useful in the generation of antibodies that bind immunospecifically to the novel substances of the invention for use in therapeutic or diagnostic methods. These antibodies may be generated according to methods known in the art, using prediction from hydrophobicity charts, as described in the “Anti-NOVX Antibodies” section below. For example the disclosed NOV11 protein have multiple hydrophilic regions, each of which can be used as an immunogen. In one embodiment, contemplated NOV11 epitope is from about amino acids 20 to 120. In another embodiment, the comtemplated NOV11 epitope is from about amino acids 130 to 150. In further embodiments, the contemplated NOV 11 epitope is from about amino acids 170 to 210, or from about amino acids 220 to 240. This novel protein also has value in development of powerful assay system for functional analysis of various human disorders, which will help in understanding of pathology of the disease and development of new drug targets for various disorders.

[0322] NOV12

[0323] A disclosed NOV12 nucleic acid of 5895 nucleotides (also referred to as SC132340676_A) encoding an plexin-1-like protein is shown in Table 12A. An open reading frame was identified beginning with an ATG initiation codon at nucleotides 77-79 and ending with a TGA codon at nucleotides 5798-5800. The putative untranslated regions are underlined and are upstream from the initiation codon and downstream from the termination codon in Table 12A. The start and stop codons are in bold letters.

TABLE 12A
NOV12 nucleotide sequence.

(SEQ ID NO:31)

CAGGGCTGAAGCTCCTGGCACCATGATGCTCACCCCAGCAGGACCAGAGCACCGAGGCCCAAGGCCCCAGCCTGCCATGC
CGCTGCCACCGCGGAGCCTGCAGGTGCTCCTGCTGCTGCTGCTGTTGCTGCTGCTGCTGCCGGGCATGTGGGCTGAGGCA
GGCTTGCCCAGGGCAGGCGGGGGTTCACAGCCCCCCTTCCGCACCTTCTCGGCCAGCGACTGGGGCCTCACCCACCTAGT
GGTGCATGAGCAGACAGGCGAGGTGTATGTGGGCGCAGTGAACCGCATCTATAAGCTGTCGGGGAACCTGACACTGCTGC
GGGCCCACGTCACGGGCCCTGTGGAGGACAACGAGAAGTGCTACCCGCCGCCCAGCGTGCAGTCCTGCCCCCACGGCCTG
GGCAGTACTGACAACGTCAACAAGCTGCTGCTGCTGGACTATGCCGCTAACCGCCTGCTGGCCTGTGGCAGCGCCTCCCA
GGGCATCTGCCAGTTCCTGCGTCTGGACGATCTCTTCAAACTGGGTGAGCCACACCACCGTAAGGAGCACTACCTGTCCA
GCGTGCAGGAGGCAGGCAGCATGGCGGGCGTGCTCATTGCCGGGCCACCGGGCCAGGGCCAGGCCAAGCTCTTCGTGGGC
ACACCCATCGATGGCAAGTCCGAGTACTTCCCCACACTGTCCAGCCGTCGGCTCATGGCCAACGAGGAGGATGCCGACAT
GTTCGGCTTCGTGTACCAGGATGAGTTTGTGTCATCACAGCTCAAGATCCCTTCGGACACGCTGTCCAAGTTCCCGGCCT
TTGACATCTACTATGTGTACAGCTTCCGCAGCGAGCAGTTTGTCTACTACCTCACGCTGCAGCTAGACACACAGCTGACC
TCGCCTGATGCCGCCGGCGAGCACTTCTTCACGTCCAAGATCGTGCGGCTCTGTGTGGACGACCCCAAATTCTACTCGTA
CGTTGAGTTCCCCATTGGCTGCGAGCAGGCGGGTGTGGAGTACCGCCTGGTGCAGGATGCCTACCTGAGCCGGCCCGGCC
GTGCCCTGGCCCACCAGCTGGGCCTGGCTGAGGACGAGGACGTGCTGTTCACTGTGTTCGCCCAGGGCCAGAAGAACCGC
GTGAAGCCACCAAAGGAGTCAGCACTGTGCCTGTTCACGCTCAGGGCCATCAAGGAGAAGATTAAGGAGCGCATCCAGTC
CTGCTACCGTGGTGAGGGCAAGCTCTCCCTGCCGTGGCTGCTCAACAAGGAGCTGGGCTGCATCAACTCGCCCCTGCAGA
TCGATGACGACTTCTGCGGGCAGGACTTCAACCAGCCCCTGGGGGGCACAGTCACCATTGAGGGGACGCCCCTGTTCGTG
GACAAGGATGATGGCCTGACCGCCGTGGCTGCCTATGACTATCGGGGCCGCACTGTGGTATTCGCCGGCACGCGAAGTGG
CCGCATCCGCAAGATCCTGGTGGACCTCTCAAACCCCGGTGGCCGGCCTGCCCTGGCCTACGAGAGCGTCGTGGCCCAGG
AGGGCAGCCCCATCCTGCGAGACCTCGTCCTCAGCCCCAACCACCAGTACCTCTACGCCATGACCGAGAAGCAGGTGACG
CGGGTGCCTGTGGAGAGCTGTGTGCAGTACACGTCCTGTGAGCTGTGTCTGGGGTCACGGGACCCCCACTGTGGCTGGTG
TGTCCTGCACAGCATGTGCTCGCGGCGGGACGCCTGTGAGCGAGCAGACGAGCCCCAGCGCTTTGCTGCGGACCTGCTGC
AGTGTGTGCAGCTGACTGTGCAGCCCCGCAATGTGTCTGTCACCATGTCCCAGGTCCCAGTACTTGTGCTGCAGGCCTGG
AACGTGCCTGACCTCTCAGCTGGCGTCAACTGCTCCTTCGAGGACTTCACGGAATCTGAGAGCGTCCTGGAGGATGGCCG
GATCCACTGCCGCTCACCCTCCGCCCGGGAGGTGGCGCCCATCACGCGGGGCCAGGGTGAGGGAGACCAGCGGGTGGTGA
AACTCTACCTAAAGTCCAAGGAGACAGGGAAGAAGTTTGCGTCTGTGGACTTCGTCTTCTACAACTGCAGCGTCCACCAG
TCGAGCTGCCTGTCCTGTGTCAACGGCTCCTTTCCCTGCCACTGGTGCAAATACCGCCACGTGTGCACACACAACGTGGC
TGACTGCCCCTTCCTGGAGGGCCGTGTCAACGTGTCTGAGGACTGCCCACAGATCCTGCCCTCCACGCAGATCTACGTGC
CAGTGGGATTCGTAAAACCCATCACCCTGGCCGCACGGAACCTGCCACAGCCACAGTCAGGCCAGCGTGGATATGAGTGC
CTCTTCCACATCCCGGGCAGCCCGGCCCGTGTCACCGCCCTGCGCTTCAACAGCTCCAGCCTGCAGTGCCAGAATTCCTC
GTACTCCTACGAGGGGAACGATGTCAGCGACCTGCCAGTGAACCTGTCAGTCGTGTGGAACGGCAACTTTGTCATTGACA
ACCCACAGAACATCCAGGCGCACCTCTACAAGTGCCCGGCCCTGCGCGAGAGCTGCGGCCTCTGCCTCAAGGCCGACCCG
CGCTTCGAGTGCGGATGGTGCGTGGCCGAGCGCCGCTGCTCCCTGCGACACCACTGCGCTGCCGACACACCTGCATCGTG
GATGCACGCGCGTCACGGCAGCAGTCGCTGCACCGACCCCAAGATCCTCAAGCTGTCCCCCGAGACGGGCCCGAGGCAGG
GCGGCACGCGGCTCACTATCACAGGCGAGAACCTGGGCCTGCGATTCGAAGACGTGCGTCTGGGCGTGCGCGTGGGCAAG
GTGCTGTGCAGCCCTGTGGAGAGCGAGTACATCAGTGCGGAGCAGATCGTCTGTGAGATCGGGGACGCCAGCTCCGTGCG
TGCCCATGACGCCCTGGTGGAGGTGTGTGTGCGGGACTGCTCACCACACTACCGCGCCCTGTCACCCAAGCGCTTCACCT
TCGTGACACCAACCTTCTACCGTGTGAGCCCCTCCCGTGGGCCTCTGTCAGGGGGCACCTGGATTGGCATCGAGGGAAGC
CACCTGAACGCAGGCAGTGATGTGGCTGTGTCGGTCGGTGGCCGGCCCTGCTCCTTCTCCTGGTCCAGGAGGAACTCCCG
TGAGATCCGGTGCCTGACACCCCCCGGGCAGAGCCCTGGCAGCGCTCCCATCATCATCAACATCAACCGCGCCCAGCTCA
CCAACCCTGAGGTGAAGTACAACTACACCGAGGACCCCACCATCCTGAGGATCGACCCCGAGTGGAGCATCAACAGCGGT
GGGACCCTCCTGACGGTCACAGGCACCAACCTGGCCACTGTCCGTGAACCCCGAATCCGGGCCAAGTATGGAGGCATTGA
GAGGGAGAAGTCCCTGGTGTACAATGACACCACCATGGTATGCCGCGCCCCGTCTGTGGCCAACCCTGTGCGCAGCCCAC
CAGAGCTGCGGGAGCGGCCGGATGAGCTGGGCTTCGTCATGGACAACGTGCGCTCCCTGCTTGTGCTCAACTCCACCTCC
TTCCTCTACTACCCTGACCCCGTACTGGAGCCACTCAGCCCCACTGGCCTGCTGGAGCTGAAGCCCAGCTCCCCACTCAT
CCTCAAGGGCCGGAACCTCTTGCCACCTGCACCCGGCAACTCCCGACTCAACTACACGGTGCTCATCGGCTCCACACCCT
GTACCCTCACCGTGTCGGAGACGCAACTGCTGTGCGAGGCGCCCAACCTCACTGGGCAGCACAAGGTCACGGTGCGTGCA
GGTGGCTTCGAGTTCTCGCCAGGGACACTGCAGGTGTACTCGGACAGCCTGCTGACGCTGCCTGCCATTGTGGGCATTGG
CGGAGGCGGGGGTCTCCTGCTGCTGGTCATCGTGGCTGTGCTCATCGCCTACAAGCGCAAGTCACGAGATGCTGACCGCA
CACTCAAGCGGCTGCAGCTCCAGATGGACAACCTGGAGTCCCGCGTGGCCCTCGAATGCAAGGAAGCCTTTGCAGAGCTG
CAGACAGACATCCACGAGCTGACCAATGACCTGGACGGTGCCGGCATCCCCTTCCTTGACTACCGGACATATGCCATGCG
GGTGCTCTTTCCTGGGATCGAGGACCACCCTGTGCTCAAGGAGATGGAGGTACAGGCCAATGTGGAGAAGTCGCTGACAC
TGTTCGGGCAGCTGCTGACCAAGAAGCACTTCCTGCTGACCTTCATCCGCACGCTGGAGGCACAGCGCAGCTTCTCCATG
CGCGACCGCGGGAATGTGGCCTCGCTCATCATGACGGCCCTGCAGGGCGAGATGGAATACGCCACAGGCGTGCTCAAGCA
GCTGCTTTCCGACCTCATCGAGAAGAACCTGGAGAGCAAGAACCACCCCAAGCTGCTACTGCGCCGGCCAACTGAGTCGG
TGGCAGAGAAGATGCTAACTAACTGGTTCACCTTCCTCTTGTATAAGTTCCTCAAGGAGTGCGCTGGGGAGCCGCTGTTC
ATGCTGTACTGCGCCATCAAGCAGCAGATGGAGAAGGGCCCCATTGACGCCATCACGGGTGAGGCACGCTACTCCCTGAG
TGAGGACAAGCTCATCCGGCAGCAGATTGACTACAAGACACTGACCCTGAACTGTGTGAACCCTGAGAATGAGAATGCAC
CTGAGGTGCCGGTGAAGGGGCTGGACTGTGACACGGTCACCCAGGCCAAGGAGAAGCTGCTGGACGCTGCCTACAAGGGC
GTGCCCTACTCCCAGCGGCCCAAGGCCGCGGACATGGACCTGGAGTGGCGCCAGGGCCGCATGGCGCGCATCATCCTGCA
GGACGAGGACGTCACCACCAAGATTGACAACGATTGGAAGAGGCTGAACACACTGGCTCACTACCAGGTGACAGACGGGT
CCTCGGTGGCACTGGTGCCCAAGCAGACGTCCGCCTACAACATCTCCAACTCCTCCACCTTCACCAAGTCCCTCAGCAGA
TACGAGAGCATGCTGCGCACGGCCAGCAGCCCCGACAGCCTGCGCTCGCGCACGCCCATGATCACGCCCGACCTGGAGAG
CGGCACCAAGCTGTGGCACCTGGTGAAGAACCACGACCACCTGGACCAGCGTGAGGGTGACCGCGGCAGCAAGATGGTCT
CGGAGATCTACTTGACACGGCTACTGGCCACCAAGCAGGGCACACTGCAGAAGTTTGTGGACGACCTGTTTGAGACCATC
TTCAGCACGGCACACCGGGGCTCAGCCCTGCCGCTGGCCATCAAGTACATGTTCGACTTCCTGGATGAGCAGGCCGACAA
GCACCAGATCCACGATGCTGACGTGCGCCACACCTGGAAGAGCAACTGCAGCCTGCCCCTGCGCTTCTGGGTGAACGTGA
TCAAGAACCCACAGTTTGTGTTCGACATTCACAAGAACAGCATCACGGACGCCTGCTTGTCGGTGGTGGCCCAGACCTTC
ATGGACTCCTGCTCCACCTCTGAGCACAAGCTGGGCAAGGACTCACCCTCCAACAAGCTGCTCTACGCCAAGGACATCCC
CAACTACAAGAGCTGGGTGGAGAGGAGGTACTATGCAGACATCGCCAAGATGCCAGCCATCAGCGACCAGGACATGAGTG
CGTATCTGGCTGAGCAGTCCCGCCTGCACCTGAGCCAGTTCAACAGCATGAGCGCCTTGCACGAGATCATCTCCTACATC
ACCAAGTACAAGGATGAGGTGCAGATCCTGGCAGCCCTGGAGAAGGATGAGCAGGCGCGGCGGCAGCGGCTGCGGAGCAA
GCTGGAGCAGGTGGTGGACACGATGGCCCTGAGCAGCTGAGCCCCAGCTGTGATCATCCAGCATGATGCAGCGTGAGGAC
AGCTGAGCAGGGACCGGGACAGCCCTCACCGCATGCGTGTGGAGTGTCCGGTGGT

[0324] In a search of public sequence databases, the NOV12 nucleic acid sequence, located on chromsome 8 has 2950 of 3362 bases (87%) identical to a plexin-1 mRNA from Mus musculus, (GENBANK-ID: D86948) (E=0.0). Public nucleotide databases include all GenBank databases and the GeneSeq patent database.

[0325] The disclosed NOV12 polypeptide (SEQ ID NO: 32) encoded by SEQ ID NO: 3,1 has 1925 amino acid residues and is presented in Table 12B using the one-letter amino acid code. Signal P. Psort and/or Hydropathy results predict that NOV12 contains a signal peptide and is likely to be localized in the plasma membrane with a certainty of 0.6000. In other embodiments, NOV12 is likely to be localized to the Golgi body with a certainty of 0.4000, to the endoplasmic reticulum (membrane) with a certainty of 0.1000, or to the endoplasmic reticulum (lumen) with a certainty of 0.1000. The most likely cleavage site for NOV12 is between positions 44 and 45: MWA-EA.

TABLE 12B
Encoded NOV12 protein sequence.

(SEQ ID NO:32)

MMLTPAGPEHRGPRPQPAMPLPPRSLQVLLLLLLLLLLLPGMWAEAGLPRAGGGSQPPFRTFSASDWGLTHL
VVHEQTGEVYVGAVNRIYKLSGNLTLLRAHVTGPVEDNEKCYPPPSVQSCPHGLGSTDNVNKLLLLDYAANR
LLACGSASQGICQFLRLDDLFKLGEPHHRKEHYLSSVQEAGSMAGVLIAGPPGQGQAKLFVGTPIDGKSEYF
PTLSSRRLMANEEDADMFGFVYQDEFVSSQLKIPSDTLSKFPAFDIYYVYSFRSEQFVYYLTLQLDTQLTSP
DAAGFHFFTSKIVRLCVDDPKFYSYVEEPIGCEQAGVEYRLVQDAYLSRPGRALAHQLGLAEDEDVLFTVFA
QGCRNRFKPPKESALCLFTLRAIKEKIKERIQSCYRGEGKLSLPWLLNKELGCINSPLQIDDDFCGQDFNQP
LGGTVTIEGTPLFVDKDDGLTAVAAYDYRGRTVVFAGTRSGRIRKILVDLSNPGGRPALAYESVVAQEGSPI
LRDLVLSPNHQYLYAMTEKQVTRVPVESCVQYTSCELCLGSRDPHCGWCVLHSMCSRRDACERADEPQRFAA
DLLQCVQLTVQPRNVSVTMSQVPVLVLQAWNVPDLSAGVNCSFEDFTESESVLEDGRIHCRSPSAREVAPIT
RGQGEGDQRVVKLYLKSKETGKKFASVDFVFYNCSVHQSSCLSCVNGSFPCHWCKYRHVCTHNVADCAFLEG
RVNVSEDCPQILPSTQIYVPVGVVKPITLAARNLPQPQSGQRGYECLFHIPGSPARVTALRFNSSSLQCQNS
SYSYEGNDVSDLPVNLSVVWNGNFVIDNPQNIQAHLYKCPALRESCGLCLKADPRFECGWCVAERRCSLRHH
CAADTPASWMHARHGSSRCTDPKILKLSPETGPRQGGTRLTITGENLGLRFEDVRLGVRVGKVLCSPVESEY
ISAEQIVCEIGDASSVRAHDALVEVCVRDCSPHYRALSPKRFTFVTPTFYRVSPSRGPLSGGTWIGIEGSHL
NAGSDVAVSVGGRPCSFSWSRRNSREIRCLTPPGQSPGSAPIIININRAQLTNPEVKYNYTEDPTILRIDPE
WSINSGGTLLTVTGTNLATVREPRIRAKYGGIERENCLVYNDTTMVCRAPSVANPVRSPPELGERPDELGFV
MDNVRSLLVLNSTSFLYYPDPVLEPLSPTGLLELKPSSPLILKGRNLLPPAPGNSRLNYTVLIGSTPCTLTV
SETQLLCEAPNLTGQHKVTVRAGGFEFSPGTLQVYSDSLLTLPAIVGIGGGGGLLLLVIVAVLIAYKRKSRD
ADRTLKRLQLQMDNLESRVALECKEAFAELQTDIHELTNDLDGAGIPFLDYRTYAMRVLFPGIEDHPVLKEM
EVQANVEKSLTLFGQLLTKKHFLLTFIRTLEAQRSFSMRDRGNVASLIMTALQGEMEYATGVLKQLLSDLIE
KNLESKNHPKLLLRRPTESVAEKMLTNWFTFLLYKFLKECAGEPLFMLYCAIKQQMEKGPIDAITGEARYSL
SEDKLIRQQIDYKTLTLNCVNPENENAPEVPVKGLDCDTVTQAKEKLLDAAYKGVPYSQRPKAADMDLEWRQ
GRMARIILQDEDVTTKIDNDWKRLNTLAHYQVTDGSSVALVPKQTSAYNISNSSTFTKSLSRYESMLRTASS
PDSLRSRTPMITPDLESGTKLWHLVKNHDHLDQREGDRGSKMVSEIYLTRLLATKQGTLQKFVDDLFETIFS
TAHRGSALPLAIKYMFDFLDEQADKHQIHDADVRHTWKSNCSLPLRFWVNVIKNPQFVFDIHKNSITDACLS
VVAQTFMDSCSTSEHKLGKDSPSNKLLYAKDIPNYKSWVERRYYADIAKMPAISDQDMSAYLAEQSRLHLSQ
FNSMSALHEIYSYITKYKDEVQILAALEKDEQARRQRLRSKLEQVVDTMALSS

[0326] A search of sequence databases reveals that the NOV12 amino acid sequence has 1820 of 1907 amino acid residues (95%) identical to, and 1859 of 1907 amino acid residues (97%) similar to, the 1894 amino acid residue plexin-1 protein from Mus musculus (P70206) (E=0.0). Public amino acid databases include the GenBank databases, SwissProt, PDB and PIR.

[0327] NOV12 is expressed in at least the following tissues: whole organism, brain, testis, trabecular Bone, lymph, germinal center B cells. In addition, NOV12 is predicted to be expressed in the following tissues because of the expression pattern of (GENBANK-ID: acc:AI255192) a closely related plexin-1 homolog in species Mus musculus: brain, testis.

[0328] The disclosed NOV12 polypeptide has homology to the amino acid sequences shown in the BLASTP data listed in Table 12C.

TABLE 12C
BLAST results for NOV12

| Gene Index/ | | Length | Identity | Positives | |
|---|---|---|---|---|---|
| Identifier | Protein/Organism | (aa) | (%) | (%) | Expect |
| Ptnr: SPTREMBL- | PLEXIN 1 - Mus | 1894 | 1820/1907 | 1859/1907 | 0.0 |
| ACC: P70206 | musculus | | (95%) | (97%) | |
| ptnr: SPTREMBL- | NOV/PLEXIN-A1 | 1754 | 1743/1762 | 1746/1762 | 0.0 |
| ACC: Q9UIW2 | PROTEIN - Homo | | (98%) | (99%) | |
| | sapiens | | | | |
| ptnr: SPTREMBL- | PLEXIN PRECURSOR - | 1905 | 1603/1893 | 1730/1893 | 0.0 |
| ACC: Q91823 | Xenopus laevis | | (84%) | (91%) | |
| ptnr: SWISSPROT- | Plexin A3 | 1871 | 1252/1874 | 1483/1874 | 0.0 |
| ACC: P51805 | precursor (Plexin | | (66%) | (79%) | |
| | 4) | | | | |
| ptnr: SPTREMBL- | PLEXIN 3 - Mus | 1872 | 1245/1874 | 1478/1874 | 0.0 |
| ACC: P70208 | musculus | | (66%) | (78%) | |

[0329] The homology between these and other sequences is shown graphically in the ClustalW analysis shown in Table 12D. In the ClustalW alignment of the NOV12 protein, as well as all other ClustalW analyses herein, the black outlined amino acid residues indicate regions of conserved sequence (i.e., regions that may be required to preserve structural or functional properties), whereas non-highlighted amino acid residues are less conserved and can potentially be altered to a much broader extent without altering protein structure or function.

[image]

[image]

[0330] Tables 12E-12N list the domain descriptions from DOMAIN analysis results against NOV12. This indicates that the NOV12 sequence has properties similar to those of other proteins known to contain this domain.

TABLE 12E
Domain Analysis of NOV12

gnl|Smart|smart00630, Sema, semaphorin domain (SEQ ID NO:113)
CD-Length = 430 residues, 100.0% aligned
Score = 242 bits (618), Expect = 1e−64

| | | | |
|---|---|---|---|
| Query: | 69 | LTHLVVHEQTGEVYVGAVNRIYKLSGNLTLLRAHVTGPVEDNEKCYPPPSVQSCPHGLGS | 128 |
| | | \| +\|++ \| \| +\|\|\|\| \|\|+\| \|\| \|\| \|\|\|\| + \| \| | |
| Sbjct: | 1 | LQNLLLDEDNGTLYVGARNRLYVLSLNLISEAEVKTGPVLSSPDCEEC--VSKGKDPP-- | 56 |
| Query: | 129 | TDNVNK-LLLLDYAANRLLACGS-ASQGICQFLRLDDLFKLGEPHHRKEHYLSSVQEAGS | 186 |
| | | \|\| \|\| \|\|\|\|\| \|+ \|\| \|\|+ \| \| +\|+ + \| +\| +\| \| + | |
| Sbjct: | 57 | TDCVNFIRLLLDYNADHLLVCGTNAFQPVCRLINLGNLDRL-EVGRESGRGRCPFDPQHN | 115 |
| Query: | 187 | MAGVLIAGPPGQGQAKLFVGTPID--GKSEYFPTLSSRRLMANEEDADMFGFVYQDEFVS | 244 |
| | | \|\|+ \| +\|+\|\|\| \| \| \| \| + \| | |
| Sbjct: | 116 | STAVLVDG-------ELYVGTVADFSGSDPAIYRSLSVRRLKGTSG-------PSLRTVL | 161 |
| Query: | 245 | SQLKIPSDTLSKFPAFDIYYVYSFRSEQFVYYLTLQLDTQLTSPDAAGEHFFTSKIVRLC | 304 |
| | | + + + +\|\|+\| \| \|\|\|+ + \| \|++ \|+\| | |
| Sbjct: | 162 | YDSRWLN---------EPNFVYAFESGDFVYF----FFRETAVEDENCGKAVVSRVARVC | 208 |
| Query: | 305 | VDD--------PKFYSYVEFPIGC---EQAGVEYRLVQDAYLSRPGRALAHQLGLAEDED | 353 |
| | | +\| \|+ \|+++ + \| + + +\| \|+\| \| +\| +\| | |
| Sbjct: | 209 | KNDVGGPRSLSKKWTSFLKARLECSVPGEFPFYFNELQAAFLLPAG---------SESDD | 259 |
| Query: | 354 | VLFTVFAQGQKNRVKPPKESALCLFTLRAIKEKIKERIQSCYRGEGKLSL----PWLLNK | 409 |
| | | \|\|+ \|\|+ \| \|\|+\| \|+\| \| \| + \| \| + + | |
| Sbjct: | 260 | VLYGVFSTS----SNPIPGSAVCAFSLSDINAVFNEPFKECETGNSQWLPYPRGLVPFPR | 315 |
| Query: | 410 | ELGCINSPLQI----DDDFC-GQDFNQPLGGTVTIEGTPLFV--DKDDGLTAVAA----Y | 458 |
| | | \| \|+\|\| \|\| + + \| \|\|\|\| \| + \|\|++\| | |
| Sbjct: | 316 | PGTCPNTPLSSKDLPDDVLNFIKTHPLMDEVVQPLTGRPLFVKTDSNYLLTSIAVDRVRT | 375 |
| Query: | 459 | DYRGRTVVFAGTRSGRIRKILVDLSNPGGRPALAYESVVAQEGSPILRDLVLSPNH | 514 |
| | | \| \|\|+\| \|\| \|\|\| \|+++ \|+ + \| \| \|\|\|+ \|\|\|\|\|\| | |
| Sbjct: | 376 | DGGNYTVLFLGTSDGRILKVVLSRSSSSSESVVLEEISVFDPGSPV-SDLVLSPKK | 430 |

[0331] TABLE 12F
Domain Analysis of NOV12

gnl|Pfam|pfam01403, Sema, Sema domain. The Sema domain occurs in
semaphorins, which are a large family of secreted and transmembrane
proteins, some of which function as repellent signals during axon
receptor. (SEQ ID NO:114)
CD-Length = 433 residues, 99.5% aligned
Score = 171 bits (432), Expect = 5e−43

| | | | |
|---|---|---|---|
| Query: | 69 | LTHLVVHEQTGEVYVGAVNRIYKLSGN----LTLLRAHVTGPVEDNEKCYPPPSVQSCPH | 124 |
| | | \|++ \| \| +\|\|\|\| \|\|+\| \|+ + \|+ \| \| \|+\| | |
| Sbjct: | 1 | FVTLLLDEDRGRLYVGARNRVYVLNLEDLSEVLNLKTGWPGSCETCEECNMKGKSP---- | 56 |
| Query: | 125 | GLGSTDNVN-KLLLLDYAANRLLACGS-ASQGICQFLRLDDLFKLGEPHHRKEHYLSSVQ | 182 |
| | | \|+ \| +\| \| \| \|\|+ \| \| +\| + \| \|\|\| \| + | |
| Sbjct: | 57 | ---LTECTNFIRVLQAYNDTHLYVCGTNAFQPVCTLINLGDLFSLDVDNEEDGCGDCPYD | 113 |
| Query: | 183 | EAGSMAGVLIAGPPGQGQAKLFVGTPIDGKSEYFPTLSSRRLMANEEDADMFGFVYQDEF | 242 |
| | | \|+ \|\|+ \| +\|+ \|\| \|\| + + \| + \| | |
| Sbjct: | 114 | PLGNTTSVLVQG------GELYSGTVID------FSGRDPSIRRLLGSHDGLRTEFHD-- | 159 |
| Query: | 243 | VSSQLKIPSDTLSKFPAFDIYYVYSFRSEQFVYYLTLQLDTQLTSPDAAGEHFFTSKIVR | 302 |
| | | \| \| +\|+ ++ \|+\|\|+\|\| \|+ \|\|+ + \|+ + \|++ \| | |
| Sbjct: | 160 | -SKWLNLPNFVD----SYPIHYVHSF-SDDKVYF----FFRETAVEDSNCKTIH-SRVAR | 208 |
| Query: | 303 | LCVDDPKFYSYVEFPIGC-------------EQAGVEYRLVQDAYLSRPGRALAHQLGLA | 349 |
| | | +\| +\|\| \|\|+\| \| + +\| \|++ \| \| | |
| Sbjct: | 209 | VCKNDPGGRSYLELNKWTTFLKARLNCSIPGEGTPFYFNELQAAFVLPTG---------A | 259 |
| Query: | 350 | EDEDVLFTVFAQGQKNRVKPPKESALCLFTLRAIKE--KIKERIQSCYRGEGKLSLPWLL | 407 |
| | | + + \|\|+ \|\| \|\|+\| \|++ \| + + + \|\| | |
| Sbjct: | 260 | DTDPVLYGVFTTS----SNSSAGSAVCAFSMSDINQVFEGPFKHQSPNSKWLPYRGKVPQ | 315 |
| Query: | 408 | NKELGCINSP-LQIDDDFCGQDFNQPLGGTVT--IEGTPLFVDKDDG--LTAVA-----A | 457 |
| | | + \| \|+ \| + \|\| \|\| \| + \|\|\|\| + \|\|++\| \| | |
| Sbjct: | 316 | PRPGQCPNASGLNLPDDTLNFIRCHPLMDEVVPPLHNVPLFVGQSGNYRLTSIAVDRVRA | 375 |
| Query: | 458 | YDYRGRTVVFAGTRSGRIRKILVDLSNPGGR---PALAYESVVAQEGSPILRDLVLS | 511 |
| | | \| + \|\|+\| \|\| \|\|+ \| \|\| + \|\|+\| +\| \|+ \| ++ \| | |
| Sbjct: | 376 | GDGQIYTVLFLGTDDGRV-LKQVVLSRSSSASYLVVVLEESLVFPDGEPVQRMVISS | 431 |

[0332] TABLE 12G
Domain Analysis of NOV12

gnl|Pfam|pfam01833, TIG, IPT TIG domain. This family consists of a
domain that has an immunoglobulin like fold. These domains are found
in cell surface receptors such as Met and Ron as well as in
intracellular transcription factors where it is involved in DNA
binding. (SEQ ID NO:115)
CD-Length = 85 residues, 100.0% aligned
Score = 78.2 bits (191), Expect = 4e−15

| | | | |
|---|---|---|---|
| Query: | 983 | PTFYRVSPSRGPLSGGTWIGIEGSHLNAGSDVAVSVGGRPCSFSWSRRNSREIRCLTPPG | 1042 |
| | | \| +\|\|\| \|\|\|\|\|\|\| \| \| \|\|+\| +\| \|+ \|+ \|\| \| + + +\| \| \|\|\| | |
| Sbjct: | 1 | PVITSISPSSGPLSGGTEITITGSNLGSGEDIKVTFGGTECDV--VSQEASQIVCKTPPY | 58 |
| Query: | 1043 | QSPGSAPIIININRAQLTNPEVKYNYT 1069 | |
| | | + \| \|+ ++++ \|++ \| + \| | |
| Sbjct: | 59 | ANGGPQPVTVSLDGGGLSSSPVTFTYV 85 | |

[0333] TABLE 12H
Domain Analysis of NOV12

gnl|Pfam|pfam01833, TIG, IPT TIG domain. This family consists of a
domain that has an immunoglobulin like fold. These domains are found
in cell surface receptors such as Met and Ron as well as in
intracellular transcription factors where it is involved in DNA
binding. (SEQ ID NO:115)
CD-Length = 85 residues, 100.0% aligned
Score = 60.1 bits (144), Expect = 1e−09

| | | | |
|---|---|---|---|
| Query: | 886 | PKILKLSPETGPRQGGTRLTITGENLGLRFEDVRLGVRVGKVLCSPVESEYISAEQIVCE | 945 |
| | | \| \| +\|\| +\|\| \|\|\| +\|\|\|\| \|\|\| + \| \| \| \| \| \|\|\|\|+ | |
| Sbjct: | 1 | PVITSISPSSGPLSGGTEITITGSNLGS---GEDIKVTFGGTECDVVSQEA---SQIVCK | 54 |
| Query: | 946 | IGDASSVRAHDALVEVCVRDCSPHYRALSPKRFTFV 981 | |
| | | ++ \| + \| \|\| \|\|+\| | |
| Sbjct: | 55 | TPPYANGGPQPVTVSLDGGGLSS-----SPVTFTYV 85 | |

[0334] TABLE 12I
Domain Analysis of NOV12

gnl|Pfam|pfam01833, TIG, IPT TIG domain. This family consists of a
domain that has an immunoglobulin like fold. These domains are found
in cell surface receptors such as Met and Ron as well as in
intracellular transcription factors where it is involved in DNA
binding. (SEQ ID NO:115)
CD-Length = 85 residues, 100.0% aligned
Score = 46.6 bits (109), Expect = 1e−05

| | | | |
|---|---|---|---|
| Query: | 1173 | PVLEPLSPTGLLELKPSSPLILKGRNLLPPAPGNSRLNYTVLIGSTPCTLT-VSETQLLC | 1231 |
| | | \|\|+ +\|\|+ \| + + + \| \|\| \| + \| \| \| \| + +\|++\| | |
| Sbjct: | 1 | PVITSISPSSG-PLSGGTEITITGSNL------GSGEDIKVTFGGTECDVVSQEASQIVC | 53 |
| Query: | 1232 | EAPNLTGQH----KVTVRAGGFEFSPGTLQVY 1259 | |
| | | + \| \|++ \|\| \|\| \| | |
| Sbjct: | 54 | KTPPYANGGPQPVTVSLDGGGLSSSPVTFTYV 85 | |

[0335] TABLE 12J
Domain Analysis of NOV12

gnl|Smart|smart00429, IPT, ig-like, plexins, transcription factors
(SEQ ID NO:116)
CD-Length = 93 residues, 100.0% aligned
Score = 70.9 bits (172), Expect = 6e−13

| | | | |
|---|---|---|---|
| Query: | 885 | DPKILKLSPETGPRQGGTRLTITGENLGLRFEDVRLGVRVGKVLCSPVESEYISAEQIVC | 944 |
| | | \|\| \| ++\|\| +\|\| \|\|\|\|+\|+ \|+\|\| \| + \| \|\|+\| \|+ + \|+ \| \|\|\| | |
| Sbjct: | 1 | DPVITRISPNSGPLSGGTRITLCGKNLDS-ISVVFVEVGVGEVPCTFLPSDV-SQTAIVC | 58 |
| Query: | 945 | EIGDASSVRAHDALVEVCVRDCSPHYRALSPKRFTFV 981 | |
| | | + \| \| \| + \| \|\|+\| | |
| Sbjct: | 59 | KTP-PYHNIPGSVPVRVEVGLRNGGVPG-EPSPFTYV 93 | |

[0336] TABLE 12
K. Domain Analysis of NOV 12

gn1|Pfam|pfam01437, Plexin_repeat, Plexin repeat. A cysteine rich
repeat found in several different extracellular receptors. The
function of the repeat is unknown. Three copies of the repeat are
found Plexin. Two copies of the repeat are found in mahogany
protein. A related C. elegans protein contains four copies of the
repeat. The Met receptor contains a single copy of the repeat.
The Pfam alignment shows 6 conserved cysteine residues that may
form three conserved disulphide bridges. (SEQ ID NO:117)
CD-Length = 48 residues, 100.0% aligned
Score = 59.3 bits (142), Expect = 2e−09

| | | | |
|---|---|---|---|
| Query: | 532 | SCVQYTSCELCLGSRDPHCGWCVLHSMCSRRDACERADEPQRFAADLLQCV | 582 |
| | | +\| \|+\|\|\| \|\| + \|\| \|\|\|\| \|+\| + \| \| + ++ \| | |
| Sbjct: | 1 | NCSQHTSCGSCLSAPDPGCGWCPSRKRCTRLEECSR---GEGWSQSQETCP | 48 |

[0337] TABLE 12L

Domain Analysis of NOV12

gn1|Pfam|pfam01437, Plexin_repeat, Plexin repeat. A cysteine rich
repeat found in several different extracellular receptors. The
function of the repeat is unknown. Three copies of the repeat are
found Plexin. Two copies of the repeat are found in mahogany
protein. A related C. elegans protein contains four copies of the
repeat. The Met receptor contains a single copy of the repeat.
The Pfam alignment shows 6 conserved cysteine residues that may
form three conserved disulphide bridges. (SEQ ID NO:117)
CD-Length = 48 residues, 100.0% aligned
Score = 53.5 bits (127), Expect = 1e−07

| | | | |
|---|---|---|---|
| Query: | 681 | NCSVHQSSCLSCVNGSFP-CHWCKYRHVCTHNVADCAFLEGRVNVSEDCP | 729 |
| | | \|\|\| \| \| \| \|\|++ \| \| \|\| \| \|\| +\|+ \|\| \| \|\| | |
| Sbjct: | 1 | NCSQHTS-CGSCLSAPDPGCGWCPSRKRCTRL-EECSRGEGWSQSQETCP | 48 |

[0338] TABLE 12M

Domain Analysis of NOV 12

gn1|Pfam|pfam01437, Plexin_repeat, Plexin repeat. A cysteine
rich repeat found in several different extracellular receptors.
The function of the repeat is unknown. Three copies of the
repeat are found Plexin. Two copies of the repeat are found in
mahogany protein. A related C. elegans protein contains four
copies of the repeat. The Met receptor contains a single copy
of the repeat. The Pfam alignment shows 6 conserved cysteine
residues that may form three conserved disulphide bridges.
(SEQ ID NO:117)
CD-Length = 48 residues, 89.6% aligned
Score =46.2 bits (108), Expect = 2e−05

| | | | |
|---|---|---|---|
| Query: | 835 | RESCGLCLKADPRFECGWCVAERRCSLRHHCAADTPASWMHARHGSSRC | 883 |
| | | \|\|\| \|\| \| \| \|\|\|\| + +\|\|+ \| + \| | |
| Sbjct: | 5 | HTSCGSCLSA-PDPGCGWCPSRKRCTRLEEC-----SRGEGWSQSQETC | 47 |

[0339] TABLE 12N
Domain Analysis of NOV12

gn1|Smart|smart00423, PSI, domain found in Plexins,
Semaphorins and Integrins (SEQ ID NO:118)
CD-Length = 47 residues, 89.4% aligned
Score = 44.3 bits (103), Expect = 6e−05

| | | | |
|---|---|---|---|
| Query: | 833 | ALRESCGLCLKADPRFECGWCVAERRCSLRHHCAADTPASWMHA | 876 |
| | | + \|\| \|\| \| + \| \|\| ++ \|\|+ \| + +\| | |
| Sbjct: | 3 | SAYTSCSECLLARDPY-CAWCSSQGRCTSGERCDS-LRQNWSSG | 44 |

[0340] Plexin is a type I membrane protein which was identified in Xenopus nervous system by hybridoma technique. Molecular cloning studies demonstrated that the extracellular segment of the plexin protein possesses three internal repeats of cysteine cluster which are homologous to the cysteine-rich domain of the c-met proto-oncogene protein product. A cell aggregation test revealed that the plexin protein mediated cell adhesion via a homophilic binding mechanism, in the presence of calcium ions. Plexin was expressed in the neuronal elements composing particular neuron circuits in Xenopus CNS and PNS. These findings indicate that plexin is a new member of the Ca(2+)-dependent cell adhesion molecules, and suggest that the molecule plays an important role in neuronal cell contact and neuron network formation.

[0341] In the developing nervous system axons navigate with great precision over large distances to reach their target areas. Chemorepulsive signals such as the semaphorins play an essential role in this process. The effects of one of these repulsive cues, semaphorin 3A (Sema3A), are mediated by the membrane protein neuropilin-1 (Npn-1). Recent work has shown that neuropilin-1 is essential but not sufficient to form functional Sema3A receptors and indicates that additional components are required to transduce signals from the cell surface to the cytoskeleton. Members of the plexin family interact with the neuropilins and act as co-receptors for Sema3A. Neuropilin/plexin interaction restricts the binding specificity of neuropilin-1 and allows the receptor complex to discriminate between two different semaphorins. Deletion of the highly conserved cytoplasmic domain of Plexin-A1 or -A2 creates a dominant negative Sema3A receptor that renders sensory axons resistant to the repulsive effects of Sema3A when expressed in sensory ganglia. These data suggest that functional semaphorin receptors contain plexins as signal-transducing and neuropilins as ligand-binding subunits.

[0342] Physiologic SEMA3A receptors consist of NRP1/PLXN1 complexes. Two semaphorin-binding proteins, plexin-1 (PLXN1) and neuropilin-1 (NRP1; 602069), form a stable complex. While SEMA3A binding to NRP1 does not alter nonneuronal cell morphology, SEMA3A interaction with NRP1/PLXN1 complexes induces adherent cells to round up. Expression of a dominant-negative PLXN1 in sensory neurons blocked SEMA3A-induced growth cone collapse. SEMA3A treatment led to the redistribution of growth cone NRP1 and PLXN1 into clusters.

[0343] The semaphorin family of proteins constitute one of the major cues for axonal guidance. The prototypic member of this family is Sema3A, previously designated semD/III or collapsin-1. Sema3A acts as a diffusible, repulsive guidance cue in vivo for the peripheral projections of embryonic dorsal root ganglion neurons. Sema3A binds with high affinity to neuropilin-1 on growth cone filopodial tips. Although neuropilin-1 is required for Sema3A action, it is incapable of transmitting a Sema3A signal to the growth cone interior. Instead, the Sema3A/neuropilin-1 complex interacts with another transmembrane protein, plexin, on the surface of growth cones. Certain semaphorins, other than Sema3A, can bind directly to plexins. The intracellular domain of plexin is responsible for initiating the signal transduction cascade leading to growth cone collapse, axon repulsion, or growth cone turning. This intracellular cascade involves the monomeric G-protein, Rac1, and a family of neuronal proteins, the CRMPs. Rac1 is likely to be involved in semaphorin-induced rearrangements of the actin cytoskeleton, but how plexin controls Rac1 activity is not known. Vertebrate CRMPs are homologous to the Caenorhabditis elegans unc-33 protein, which is required for proper axon morphology in worms. CRMPs are essential for Sema3A-induced, neuropilin-plexin-mediated growth cone collapse, but the molecular interactions of growth cone CRMPs are not well defined. Mechanistic aspects of plexin-based signaling for semaphorin guidance cues may have implications for other axon guidance events and for the basis of growth cone motility.

[0344] In Drosophila, plexin A is a functional receptor for semaphorin-1a. The human plexin gene family comprises at least nine members in four subfamilies. Plexin-B1 is a receptor for the transmembrane semaphorin Sema4D (CD100), and plexin-C1 is a receptor for the GPI-anchored semaphorin Sema7A (Sema-K1). Secreted (class 3) semaphorins do not bind directly to plexins, but rather plexins associate with neuropilins, coreceptors for these semaphorins. Plexins are widely expressed: in neurons, the expression of a truncated plexin-A1 protein blocks axon repulsion by Sema3A. The cytoplasmic domain of plexins associates with a tyrosine kinase activity. Plexins may also act as ligands mediating repulsion in epithelial cells in vitro. Thus, plexins are receptors for multiple (and perhaps all) classes of semaphorins, either alone or in combination with neuropilins, and trigger a novel signal transduction pathway controlling cell repulsion.

[0345] In addition, recent studies have identified semaphorins and their receptors as putative molecular cues involved in olfactory pathfinding, plasticity and regeneration. The semaphorins comprise a large family of secreted and transmembrane axon guidance proteins, being either repulsive or attractive in nature. Neuropilins were shown to serve as receptors for secreted class 3 semaphorins, whereas members of the plexin family are receptors for class 1 and V (viral) semaphorins.

[0346] The disclosed NOV12 nucleic acid of the invention encoding a Plexin-1-like protein includes the nucleic acid whose sequence is provided in Table 12A or a fragment thereof. The invention also includes a mutant or variant nucleic acid any of whose bases may be changed from the corresponding base shown in Table 12A while still encoding a protein that maintains its Plexin-1-like activities and physiological functions, or a fragment of such a nucleic acid. The invention further includes nucleic acids whose sequences are complementary to those just described, including nucleic acid fragments that are complementary to any of the nucleic acids just described. The invention additionally includes nucleic acids or nucleic acid fragments, or complements thereto, whose structures include chemical modifications. Such modifications include, by way of nonlimiting example, modified bases, and nucleic acids whose sugar phosphate backbones are modified or derivatized. These modifications are carried out at least in part to enhance the chemical stability of the modified nucleic acid, such that they may be used, for example, as antisense binding nucleic acids in therapeutic applications in a subject. In the mutant or variant nucleic acids, and their complements, up to about 29 percent of the bases may be so changed.

[0347] The disclosed NOV12 protein of the invention includes the Plexin-1-like protein whose sequence is provided in Table 12B. The invention also includes a mutant or variant protein any of whose residues may be changed from the corresponding residue shown in Table 12B, while still encoding a protein that maintains its Plexin-1-like activities and physiological functions, or a functional fragment thereof. In the mutant or variant protein, up to about 29 percent of the residues may be so changed.

[0348] The protein similarity information, expression pattern, and map location for the plexin-1-like protein and the NOV12 protein disclosed herein suggest that this plexin-1-like protein may have important structural and/or physiological functions characteristic of the mannosidase protein family. Therefore, the nucleic acids and proteins of the invention are useful in potential diagnostic and therapeutic applications and as a research tool. These applications include serving as a specific or selective nucleic acid or protein diagnostic and/or prognostic marker, wherein the presence or amount of the nucleic acid or the protein are to be assessed, as well as potential therapeutic applications such as the following: (i) a protein therapeutic, (ii) a small molecule drug target, (iii) an antibody target (therapeutic, diagnostic, drug targeting/cytotoxic antibody), (iv) a nucleic acid useful in gene therapy (gene delivery/gene ablation), and (v) a composition promoting tissue regeneration in vitro and in vivo (vi) biological defense weapon.

[0349] The NOV12 nucleic acids and proteins of the invention are useful in potential diagnostic and therapeutic applications implicated in various diseases and disorders described below and/or other pathologies. For example, the compositions of the present invention will have efficacy for treatment of patients suffering from AIDS, cancer therapy, treatment of Neurologic diseases, Brain and/or autoimmune disorders like encephalomyelitis, neurodegenerative disorders, Alzheimer's Disease, Parkinson's Disorder, immune disorders, and hematopoietic disorders, endocrine diseases, muscle disorders, inflammation and wound repair, bacterial, fungal, protozoal and viral infections (particularly infections caused by HIV-1 or HIV-2), pain, cancer (including but not limited to Neoplasm; adenocarcinoma; lymphoma; prostate cancer; uterus cancer), anorexia, bulimia, asthma, Parkinson's disease, acute heart failure, hypotension, hypertension, urinary retention, osteoporosis, Crohn's disease; multiple sclerosis; and Treatment of Albright Hereditary Ostoeodystrophy, angina pectoris, myocardial infarction, ulcers, asthma, allergies, benign prostatic hypertrophy, and psychotic and neurological disorders, including anxiety, schizophrenia, manic depression, delirium, dementia, severe mental retardation and dyskinesias, such as Huntington's disease or Gilles de la Tourette syndrome, and/or other pathologies/disorders. The NOV12 nucleic acid, or fragments thereof, may further be useful in diagnostic applications, wherein the presence or amount of the nucleic acid or the protein are to be assessed.

[0350] NOV12 nucleic acids and polypeptides are further useful in the generation of antibodies that bind immunospecifically to the novel substances of the invention for use in therapeutic or diagnostic methods. These antibodies may be generated according to methods known in the art, using prediction from hydrophobicity charts, as described in the “Anti-NOVX Antibodies” section below. For example the disclosed NOV12 protein have multiple hydrophilic regions, each of which can be used as an immunogen. This novel protein also has value in development of powerful assay system for functional analysis of various human disorders, which will help in understanding of pathology of the disease and development of new drug targets for various disorders.

[0351] NOVX Nucleic Acids and Polypeptides

[0352] One aspect of the invention pertains to isolated nucleic acid molecules that encode NOVX polypeptides or biologically active portions thereof. Also included in the invention are nucleic acid fragments sufficient for use as hybridization probes to identify NOVX-encoding nucleic acids (e.g., NOVX mRNAs) and fragments for use as PCR primers for the amplification and/or mutation of NOVX nucleic acid molecules. As used herein, the term “nucleic acid molecule” is intended to include DNA molecules (e.g., cDNA or genomic DNA), RNA molecules (e.g., mRNA), analogs of the DNA or RNA generated using nucleotide analogs, and derivatives, fragments and homologs thereof. The nucleic acid molecule may be single-stranded or double-stranded, but preferably is comprised double-stranded DNA.

[0353] An NOVX nucleic acid can encode a mature NOVX polypeptide. As used herein, a “mature” form of a polypeptide or protein disclosed in the present invention is the product of a naturally occurring polypeptide or precursor form or proprotein. The naturally occurring polypeptide, precursor or proprotein includes, by way of nonlimiting example, the full-length gene product, encoded by the corresponding gene. Alternatively, it may be defined as the polypeptide, precursor or proprotein encoded by an ORF described herein. The product “mature” form arises, again by way of nonlimiting example, as a result of one or more naturally occurring processing steps as they may take place within the cell, or host cell, in which the gene product arises. Examples of such processing steps leading to a “mature” form of a polypeptide or protein include the cleavage of the N-terminal methionine residue encoded by the initiation codon of an ORF, or the proteolytic cleavage of a signal peptide or leader sequence. Thus a mature form arising from a precursor polypeptide or protein that has residues 1 to N, where residue 1 is the N-terminal methionine, would have residues 2 through N remaining after removal of the N-terminal methionine. Alternatively, a mature form arising from a precursor polypeptide or protein having residues 1 to N, in which an N-terminal signal sequence from residue 1 to residue M is cleaved, would have the residues from residue M+1 to residue N remaining. Further as used herein, a “mature” form of a polypeptide or protein may arise from a step of post-translational modification other than a proteolytic cleavage event. Such additional processes include, by way of non-limiting example, glycosylation, myristoylation or phosphorylation. In general, a mature polypeptide or protein may result from the operation of only one of these processes, or a combination of any of them.

[0354] The term “probes”, as utilized herein, refers to nucleic acid sequences of variable length, preferably between at least about 10 nucleotides (nt), 100 nt, or as many as approximately, e.g., 6,000 nt, depending upon the specific use. Probes are used in the detection of identical, similar, or complementary nucleic acid sequences. Longer length probes are generally obtained from a natural or recombinant source, are highly specific, and much slower to hybridize than shorter-length oligomer probes. Probes may be single- or double-stranded and designed to have specificity in PCR, membrane-based hybridization technologies, or ELISA-like technologies.

[0355] The term “isolated” nucleic acid molecule, as utilized herein, is one, which is separated from other nucleic acid molecules which are present in the natural source of the nucleic acid. Preferably, an “isolated” nucleic acid is free of sequences which naturally flank the nucleic acid (i.e., sequences located at the 5′-and 3′-termini of the nucleic acid) in the genomic DNA of the organism from which the nucleic acid is derived. For example, in various embodiments, the isolated NOVX nucleic acid molecules can contain less than about 5 kb, 4 kb, 3 kb, 2 kb, 1 kb, 0.5 kb or 0.1 kb of nucleotide sequences which naturally flank the nucleic acid molecule in genomic DNA of the cell/tissue from which the nucleic acid is derived (e.g., brain, heart, liver, spleen, etc.). Moreover, an “isolated” nucleic acid molecule, such as a cDNA molecule, can be substantially free of other cellular material or culture medium when produced by recombinant techniques, or of chemical precursors or other chemicals when chemically synthesized.

[0356] A nucleic acid molecule of the invention, e.g., a nucleic acid molecule having the nucleotide sequence SEQ ID NOS: 1, 3, 5, 7, 9, 11, 13, 15, 17, 19, 21, 23, 25, 27, 29, and 31, or a complement of this aforementioned nucleotide sequence, can be isolated using standard molecular biology techniques and the sequence information provided herein. Using all or a portion of the nucleic acid sequence of SEQ ID NOS: 1, 3, 5, 7, 9, 11, 13, 15, 17, 19, 21, 23, 25, 27, 29, and 31 as a hybridization probe, NOVX molecules can be isolated using standard hybridization and cloning techniques (e.g., as described in Sambrook, et al., (eds.), MOLECULAR CLONING: A LABORATORY MANUAL 2^{nd} Ed., Cold Spring Harbor Laboratory Press, Cold Spring Harbor, N.Y., 1989; and Ausubel, et al., (eds.), CURRENT PROTOCOLS IN MOLECULAR BIOLOGY, John Wiley & Sons, New York, NY, 1993.) A nucleic acid of the invention can be amplified using cDNA, mRNA or alternatively, genomic DNA, as a template and appropriate oligonucleotide primers according to standard PCR amplification techniques. The nucleic acid so amplified can be cloned into an appropriate vector and characterized by DNA sequence analysis. Furthermore, oligonucleotides corresponding to NOVX nucleotide sequences can be prepared by standard synthetic techniques, e.g., using an automated DNA synthesizer.

[0357] As used herein, the term “oligonucleotide” refers to a series of linked nucleotide residues, which oligonucleotide has a sufficient number of nucleotide bases to be used in a PCR reaction. A short oligonucleotide sequence may be based on, or designed from, a genomic or cDNA sequence and is used to amplify, confirm, or reveal the presence of an identical, similar or complementary DNA or RNA in a particular cell or tissue. Oligonucleotides comprise portions of a nucleic acid sequence having about 10 nt, 50 nt, or 100 nt in length, preferably about 15 nt to 30 nt in length. In one embodiment of the invention, an oligonucleotide comprising a nucleic acid molecule less than 100 nt in length would further comprise at least 6 contiguous nucleotides SEQ ID NOS: 1, 3, 5, 7, 9, 11, 13, 15, 17, 19, 21, 23, 25, 27, 29, and 31, or a complement thereof. Oligonucleotides may be chemically synthesized and may also be used as probes.

[0358] In another embodiment, an isolated nucleic acid molecule of the invention comprises a nucleic acid molecule that is a complement of the nucleotide sequence shown in SEQ ID NOS: 1, 3, 5, 7,9, 11, 13, 15, 17, 19, 21, 23, 25, 27, 29, and31, or a portion of this nucleotide sequence (e.g., a fragment that can be used as a probe or primer or a fragment encoding a biologically-active portion of an NOVX polypeptide). A nucleic acid molecule that is complementary to the nucleotide sequence shown SEQ ID NOS: 1, 3, 5, 7, 9, 11, 13, 15, 17, 19, 21, 23, 25, 27, 29, or 31 is one that is sufficiently complementary to the nucleotide sequence shown SEQ ID NOS: 1, 3, 5, 7, 9, 11, 13, 15, 17, 19, 21, 23, 25, 27, 29, or 31 that it can hydrogen bond with little or no mismatches to the nucleotide sequence shown SEQ ID NOS: 1, 3, 5, 7, 9, 11, 13, 15, 17, 19, 21, 23, 25, 27, 29, and 31, thereby forming a stable duplex.

[0359] As used herein, the term “complementary” refers to Watson-Crick or Hoogsteen base pairing between nucleotides units of a nucleic acid molecule, and the term “binding” means the physical or chemical interaction between two polypeptides or compounds or associated polypeptides or compounds or combinations thereof. Binding includes ionic, non-ionic, van der Waals, hydrophobic interactions, and the like. A physical interaction can be either direct or indirect. Indirect interactions may be through or due to the effects of another polypeptide or compound. Direct binding refers to interactions that do not take place through, or due to, the effect of another polypeptide or compound, but instead are without other substantial chemical intermediates.

[0360] Fragments provided herein are defined as sequences of at least 6 (contiguous) nucleic acids or at least 4 (contiguous) amino acids, a length sufficient to allow for specific hybridization in the case of nucleic acids or for specific recognition of an epitope in the case of amino acids, respectively, and are at most some portion less than a full length sequence. Fragments may be derived from any contiguous portion of a nucleic acid or amino acid sequence of choice. Derivatives are nucleic acid sequences or amino acid sequences formed from the native compounds either directly or by modification or partial substitution. Analogs are nucleic acid sequences or amino acid sequences that have a structure similar to, but not identical to, the native compound but differs from it in respect to certain components or side chains. Analogs may be synthetic or from a different evolutionary origin and may have a similar or opposite metabolic activity compared to wild type. Homologs are nucleic acid sequences or amino acid sequences of a particular gene that are derived from different species.

[0361] Derivatives and analogs may be full length or other than full length, if the derivative or analog contains a modified nucleic acid or amino acid, as described below. Derivatives or analogs of the nucleic acids or proteins of the invention include, but are not limited to, molecules comprising regions that are substantially homologous to the nucleic acids or proteins of the invention, in various embodiments, by at least about 70%, 80%, or 95% identity (with a preferred identity of 80-95%) over a nucleic acid or amino acid sequence of identical size or when compared to an aligned sequence in which the alignment is done by a computer homology program known in the art, or whose encoding nucleic acid is capable of hybridizing to the complement of a sequence encoding the aforementioned proteins under stringent, moderately stringent, or low stringent conditions. See e.g. Ausubel, et al., CURRENT PROTOCOLS IN MOLECULAR BIOLOGY, John Wiley & Sons, New York, NY, 1993, and below.

[0362] A “homologous nucleic acid sequence” or “homologous amino acid sequence,” or variations thereof, refer to sequences characterized by a homology at the nucleotide level or amino acid level as discussed above. Homologous nucleotide sequences encode those sequences coding for isoforms of NOVX polypeptides. Isoforms can be expressed in different tissues of the same organism as a result of, for example, alternative splicing of RNA. Alternatively, isoforms can be encoded by different genes. In the invention, homologous nucleotide sequences include nucleotide sequences encoding for an NOVX polypeptide of species other than humans, including, but not limited to: vertebrates, and thus can include, e.g., frog, mouse, rat, rabbit, dog, cat cow, horse, and other organisms. Homologous nucleotide sequences also include, but are not limited to, naturally occurring allelic variations and mutations of the nucleotide sequences set forth herein. A homologous nucleotide sequence does not, however, include the exact nucleotide sequence encoding human NOVX protein. Homologous nucleic acid sequences include those nucleic acid sequences that encode conservative amino acid substitutions (see below) in SEQ ID NOS: 1, 3, 5, 7, 9, 11, 13, 15, 17, 19, 21, 23, 25, 27, 29, and 31, as well as a polypeptide possessing NOVX biological activity. Various biological activities of the NOVX proteins are described below.

[0363] An NOVX polypeptide is encoded by the open reading frame (“ORF”) of an NOVX nucleic acid. An ORF corresponds to a nucleotide sequence that could potentially be translated into a polypeptide. A stretch of nucleic acids comprising an ORF is uninterrupted by a stop codon. An ORF that represents the coding sequence for a full protein begins with an ATG “start” codon and terminates with one of the three “stop” codons, namely, TAA, TAG, or TGA. For the purposes of this invention, an ORF may be any part of a coding sequence, with or without a start codon, a stop codon, or both. For an ORF to be considered as a good candidate for coding for a bona fide cellular protein, a minimum size requirement is often set, e.g., a stretch of DNA that would encode a protein of 50 amino acids or more.

[0364] The nucleotide sequences determined from the cloning of the human NOVX genes allows for the generation of probes and primers designed for use in identifying and/or cloning NOVX homologues in other cell types, e.g. from other tissues, as well as NOVX homologues from other vertebrates. The probe/primer typically comprises substantially purified oligonucleotide. The oligonucleotide typically comprises a region of nucleotide sequence that hybridizes under stringent conditions to at least about 12, 25, 50, 100, 150, 200, 250, 300, 350 or 400 consecutive sense strand nucleotide sequence SEQ ID NOS: 1, 3, 5, 7, 9, 11, 13, 15, 17, 19, 21, 23, 25, 27, 29, or 31; or an anti-sense strand nucleotide sequence of SEQ ID NOS: 1, 3, 5, 7, 9, 11, 13, 15, 17, 19, 21, 23, 25, 27, 29, or 31; or of a naturally occurring mutant of SEQ ID NOS: 1, 3, 5, 7, 9, 11, 13, 15, 17, 19, 21, 23, 25, 27, 29, and 31.

[0365] Probes based on the human NOVX nucleotide sequences can be used to detect transcripts or genomic sequences encoding the same or homologous proteins. In various embodiments, the probe further comprises a label group attached thereto, e.g. the label group can be a radioisotope, a fluorescent compound, an enzyme, or an enzyme co-factor. Such probes can be used as a part of a diagnostic test kit for identifying cells or tissues which mis-express an NOVX protein, such as by measuring a level of an NOVX-encoding nucleic acid in a sample of cells from a subject e.g., detecting NOVX mRNA levels or determining whether a genomic NOVX gene has been mutated or deleted. “A polypeptide having a biologically-active portion of an NOVX polypeptide” refers to polypeptides exhibiting activity similar, but not necessarily identical to, an activity of a polypeptide of the invention, including mature forms, as measured in a particular biological assay, with or without dose dependency. A nucleic acid fragment encoding a “biologically-active portion of NOVX” can be prepared by isolating a portion SEQ ID NOS: 1, 3, 5, 7, 9, 11, 13, 15, 17, 19, 21, 23, 25, 27, 29, or 31, that encodes a polypeptide having an NOVX biological activity (the biological activities of the NOVX proteins are described below), expressing the encoded portion of NOVX protein (e.g., by recombinant expression in vitro) and assessing the activity of the encoded portion of NOVX.

[0366] NOVX Nucleic Acid and Polypeptide Variants

[0367] The invention further encompasses nucleic acid molecules that differ from the nucleotide sequences shown in SEQ ID NOS: 1, 3, 5, 7, 9, 11, 13, 15, 17, 19, 21, 23, 25, 27, 29, and 31 due to degeneracy of the genetic code and thus encode the same NOVX proteins as that encoded by the nucleotide sequences shown in SEQ ID NOS: 1, 3, 5, 7, 9, 11, 13, 15, 17, 19, 21, 23, 25, 27, 29, and 31. In another embodiment, an isolated nucleic acid molecule of the invention has a nucleotide sequence encoding a protein having an amino acid sequence shown in SEQ ID NOS: 2, 4, 6, 8, 10, 12, 14, 16, 18, 20, 22, 24, 26, 28, 30, or 32.

[0368] In addition to the human NOVX nucleotide sequences shown in SEQ ID NOS: 1, 3, 5, 7, 9, 11, 13, 15, 17, 19, 21, 23, 25, 27, 29, and 31, it will be appreciated by those skilled in the art that DNA sequence polymorphisms that lead to changes in the amino acid sequences of the NOVX polypeptides may exist within a population (e.g., the human population). Such genetic polymorphism in the NOVX genes may exist among individuals within a population due to natural allelic variation. As used herein, the terms “gene” and “recombinant gene” refer to nucleic acid molecules comprising an open reading frame (ORF) encoding an NOVX protein, preferably a vertebrate NOVX protein. Such natural allelic variations can typically result in 1-5% variance in the nucleotide sequence of the NOVX genes. Any and all such nucleotide variations and resulting amino acid polymorphisms in the NOVX polypeptides, which are the result of natural allelic variation and that do not alter the functional activity of the NOVX polypeptides, are intended to be within the scope of the invention.

[0369] Moreover, nucleic acid molecules encoding NOVX proteins from other species, and thus that have a nucleotide sequence that differs from the human SEQ ID NOS: 1, 3, 5, 7, 9, 11, 13, 15, 17, 19, 21, 23, 25, 27, 29, and 31 are intended to be within the scope of the invention. Nucleic acid molecules corresponding to natural allelic variants and homologues of the NOVX cDNAs of the invention can be isolated based on their homology to the human NOVX nucleic acids disclosed herein using the human cDNAs, or a portion thereof, as a hybridization probe according to standard hybridization techniques under stringent hybridization conditions.

[0370] Accordingly, in another embodiment, an isolated nucleic acid molecule of the invention is at least 6 nucleotides in length and hybridizes under stringent conditions to the nucleic acid molecule comprising the nucleotide sequence of SEQ ID NOS: 1, 3, 5, 7, 9, 11, 13, 15, 17, 19, 21, 23, 25, 27, 29, and 31. In another embodiment, the nucleic acid is at least 10, 25, 50, 100, 250, 500, 750, 1000, 1500, or 2000 or more nucleotides in length. In yet another embodiment, an isolated nucleic acid molecule of the invention hybridizes to the coding region. As used herein, the term “hybridizes under stringent conditions” is intended to describe conditions for hybridization and washing under which nucleotide sequences at least 60% homologous to each other typically remain hybridized to each other.

[0371] Homologs (i.e., nucleic acids encoding NOVX proteins derived from species other than human) or other related sequences (e.g., paralogs) can be obtained by low, moderate or high stringency hybridization with all or a portion of the particular human sequence as a probe using methods well known in the art for nucleic acid hybridization and cloning.

[0372] As used herein, the phrase “stringent hybridization conditions” refers to conditions under which a probe, primer or oligonucleotide will hybridize to its target sequence, but to no other sequences. Stringent conditions are sequence-dependent and will be different in different circumstances. Longer sequences hybridize specifically at higher temperatures than shorter sequences. Generally, stringent conditions are selected to be about 5° C. lower than the thermal melting point (Tm) for the specific sequence at a defined ionic strength and pH. The Tm is the temperature (under defined ionic strength, pH and nucleic acid concentration) at which 50% of the probes complementary to the target sequence hybridize to the target sequence at equilibrium. Since the target sequences are generally present at excess, at Tm, 50% of the probes are occupied at equilibrium. Typically, stringent conditions will be those in which the salt concentration is less than about 1.0 M sodium ion, typically about 0.01 to 1.0 M sodium ion (or other salts) at pH 7.0 to 8.3 and the temperature is at least about 30° C. for short probes, primers or oligonucleotides (e.g., 10 nt to 50 nt) and at least about 60° C. for longer probes, primers and oligonucleotides. Stringent conditions may also be achieved with the addition of destabilizing agents, such as formamide.

[0373] Stringent conditions are known to those skilled in the art and can be found in Ausubel, et al., (eds.), CURRENT PROTOCOLS IN MOLECULAR BIOLOGY, John Wiley & Sons, N.Y. (1989), 6.3.1-6.3.6. Preferably, the conditions are such that sequences at least about 65%, 70%, 75%, 85%, 90%, 95%, 98%, or 99% homologous to each other typically remain hybridized to each other. A non-limiting example of stringent hybridization conditions are hybridization in a high salt buffer comprising 6×SSC, 50 mM Tris-HCI (pH 7.5), 1 mM EDTA, 0.02% PVP, 0.02% Ficoll, 0.02% BSA, and 500 mg/ml denatured salmon sperm DNA at 65° C., followed by one or more washes in 0.2×SSC, 0.01% BSA at 50° C. An isolated nucleic acid molecule of the invention that hybridizes under stringent conditions to the sequences SEQ ID NOS: 1, 3, 5, 7, 9, 11, 13, 15, 17, 19, 21, 23, 25, 27, 29, and 31, corresponds to a naturally-occurring nucleic acid molecule. As used herein, a “naturally-occurring” nucleic acid molecule refers to an RNA or DNA molecule having a nucleotide sequence that occurs in nature (e.g., encodes a natural protein).

[0374] In a second embodiment, a nucleic acid sequence that is hybridizable to the nucleic acid molecule comprising the nucleotide sequence of SEQ ID NOS: 1, 3, 5, 7, 9, 11, 13, 15, 17, 19, 21, 23, 25, 27, 29, and 31, or fragments, analogs or derivatives thereof, under conditions of moderate stringency is provided. A non-limiting example of moderate stringency hybridization conditions are hybridization in 6×SSC, 5×Denhardt's solution, 0.5% SDS and 100 mg/ml denatured salmon sperm DNA at 55° C., followed by one or more washes in 1×SSC, 0.1% SDS at 37° C. Other conditions of moderate stringency that may be used are well-known within the art. See, e.g., Ausubel, et al. (eds.), 1993, CURRENT PROTOCOLS IN MOLECULAR BIOLOGY, John Wiley & Sons, NY, and Kriegler, 1990; GENE TRANSFER AND EXPRESSION, A LABORATORY MANUAL, Stockton Press, NY.

[0375] In a third embodiment, a nucleic acid that is hybridizable to the nucleic acid molecule comprising the nucleotide sequences SEQ ID NOS: 1, 3, 5, 7, 9, 11, 13, 15, 17, 19, 21, 23, 25, 27, 29, and 31, or fragments, analogs or derivatives thereof, under conditions of low stringency, is provided. A non-limiting example of low stringency hybridization conditions are hybridization in 35% formamide, 5×SSC, 50 mM Tris-HCl (pH 7.5), 5 mM EDTA, 0.02% PVP, 0.02% Ficoll, 0.2% BSA, 100 mg/ml denatured salmon sperm DNA, 10% (wt/vol) dextran sulfate at 40° C., followed by one or more washes in 2×SSC, 25 mM Tris-HCl (pH 7.4), 5 mM EDTA, and 0.1% SDS at 50° C. Other conditions of low stringency that may be used are well known in the art (e.g., as employed for cross-species hybridizations). See, e.g., Ausubel, et al. (eds.), 1993, CURRENT PROTOCOLS IN MOLECULAR BIOLOGY, John Wiley & Sons, NY, and Kriegler, 1990, GENE TRANSFER AND EXPRESSION, A LABORATORY MANUAL, Stockton Press, NY; Shilo and Weinberg, 1981. Proc Natl Acad Sci USA 78: 6789-6792.

[0376] Conservative Mutations

[0377] In addition to naturally-occurring allelic variants of NOVX sequences that may exist in the population, the skilled artisan will further appreciate that changes can be introduced by mutation into the nucleotide sequences SEQ ID NOS: 1, 3, 5, 7, 9, 11, 13, 15, 17, 19, 21, 23, 25, 27, 29, and 31, thereby leading to changes in the amino acid sequences of the encoded NOVX proteins, without altering the functional ability of said NOVX proteins. For example, nucleotide substitutions leading to amino acid substitutions at “non-essential” amino acid residues can be made in the sequence SEQ ID NOS: 2, 4, 6, 8, 10, 12, 14, 16, 18, 20, 22, 24, 26, 28, 30, or 32. A “non-essential” amino acid residue is a residue that can be altered from the wild-type sequences of the NOVX proteins without altering their biological activity, whereas an “essential” amino acid residue is required for such biological activity. For example, amino acid residues that are conserved among the NOVX proteins of the invention are predicted to be particularly non-amenable to alteration. Amino acids for which conservative substitutions can be made are well-known within the art.

[0378] Another aspect of the invention pertains to nucleic acid molecules encoding NOVX proteins that contain changes in amino acid residues that are not essential for activity. Such NOVX proteins differ in amino acid sequence from SEQ ID NOS: 1, 3, 5, 7,9, 11, 13, 15, 17, 19, 21, 23, 25, 27, 29, and 31 yet retain biological activity. In one embodiment, the isolated nucleic acid molecule comprises a nucleotide sequence encoding a protein, wherein the protein comprises an amino acid sequence at least about 45% homologous to the amino acid sequences SEQ ID NOS: 2, 4, 6, 8, 10, 12, 14, 16, 18, 20, 22, 24, 26, 28, 30, and 32. Preferably, the protein encoded by the nucleic acid molecule is at least about 60% homologous to SEQ ID NOS: 2, 4, 6, 8, 10, 12, 14, 16, 18, 20, 22, 24, 26, 28, 30, and 32; more preferably at least about 70% homologous SEQ ID NOS: 2, 4, 6, 8, 10, 12, 14, 16, 18, 20, 22, 24, 26, 28, 30, or 32; still more preferably at least about 80% homologous to SEQ ID NOS: 2, 4, 6, 8, 10, 12, 14, 16, 18, 20, 22, 24, 26, 28, 30, or 32; even more preferably at least about 90% homologous to SEQ ID NOS: 2, 4, 6, 8, 10, 12, 14, 16, 18, 20, 22, 24, 26, 28, 30, or 32; and most preferably at least about 95% homologous to SEQ ID NOS: 2, 4, 6, 8, 10, 12, 14, 16, 18, 20, 22, 24, 26, 28, 30, or 32.

[0379] An isolated nucleic acid molecule encoding an NOVX protein homologous to the protein of SEQ ID NOS: 2, 4, 6, 8, 10, 12, 14, 16, 18, 20, 22, 24, 26, 28, 30, or 32 can be created by introducing one or more nucleotide substitutions, additions or deletions into the nucleotide sequence of SEQ ID NOS: 1, 3, 5, 7, 9, 11, 13, 15, 17, 19, 21, 23, 25, 27, 29, and 31, such that one or more amino acid substitutions, additions or deletions are introduced into the encoded protein.

[0380] Mutations can be introduced into SEQ ID NOS: 1, 3, 5, 7, 9, 11, 13, 15, 17, 19, 21, 23, 25, 27, 29, and 31 by standard techniques, such as site-directed mutagenesis and PCR-mediated mutagenesis. Preferably, conservative amino acid substitutions are made at one or more predicted, non-essential amino acid residues. A “conservative amino acid substitution” is one in which the amino acid residue is replaced with an amino acid residue having a similar side chain. Families of amino acid residues having similar side chains have been defined within the art. These families include amino acids with basic side chains (e.g., lysine, arginine, histidine), acidic side chains (e.g., aspartic acid, glutamic acid), uncharged polar side chains (e.g., glycine, asparagine, glutamine, serine, threonine, tyrosine, cysteine), nonpolar side chains (e.g., alanine, valine, leucine, isoleucine, proline, phenylalanine, methionine, tryptophan), beta-branched side chains (e.g., threonine, valine, isoleucine) and aromatic side chains (e.g., tyrosine, phenylalanine, tryptophan, histidine). Thus, a predicted non-essential amino acid residue in the NOVX protein is replaced with another amino acid residue from the same side chain family. Alternatively, in another embodiment, mutations can be introduced randomly along all or part of an NOVX coding sequence, such as by saturation mutagenesis, and the resultant mutants can be screened for NOVX biological activity to identify mutants that retain activity. Following mutagenesis SEQ ID NOS: 1, 3, 5, 7, 9, 11, 13, 15, 17, 19, 21, 23, 25, 27, 29, and 31, the encoded protein can be expressed by any recombinant technology known in the art and the activity of the protein can be determined.

[0381] The relatedness of amino acid families may also be determined based on side chain interactions. Substituted amino acids may be fully conserved “strong” residues or fully conserved “weak” residues. The “strong” group of conserved amino acid residues may be any one of the following groups: STA, NEQK, NHQK, NDEQ, QHRK, MILV, MILF, HY, FYW, wherein the single letter amino acid codes are grouped by those amino acids that may be substituted for each other. Likewise, the “weak” group of conserved residues may be any one of the following: CSA, ATV, SAG, STNK, STPA, SGND, SNDEQK, NDEQHK, NEQHRK, VLIM, HFY, wherein the letters within each group represent the single letter amino acid code.

[0382] In one embodiment, a mutant NOVX protein can be assayed for (i) the ability to form protein:protein interactions with other NOVX proteins, other cell-surface proteins, or biologically-active portions thereof, (ii) complex formation between a mutant NOVX protein and an NOVX ligand; or (iii) the ability of a mutant NOVX protein to bind to an intracellular target protein or biologically-active portion thereof; (e.g. avidin proteins).

[0383] In yet another embodiment, a mutant NOVX protein can be assayed for the ability to regulate a specific biological function (e.g., regulation of insulin release).

[0384] Antisense Nucleic Acids

[0385] Another aspect of the invention pertains to isolated antisense nucleic acid molecules that are hybridizable to or complementary to the nucleic acid molecule comprising the nucleotide sequence of SEQ ID NOS: 1, 3, 5, 7, 9, 11, 13, 15, 17, 19, 21, 23, 25, 27, 29, and 31, or fragments, analogs or derivatives thereof. An “antisense” nucleic acid comprises a nucleotide sequence that is complementary to a “sense” nucleic acid encoding a protein (e.g., complementary to the coding strand of a double-stranded cDNA molecule or complementary to an mRNA sequence). In specific aspects, antisense nucleic acid molecules are provided that comprise a sequence complementary to at least about 10, 25, 50, 100, 250 or 500 nucleotides or an entire NOVX coding strand, or to only a portion thereof. Nucleic acid molecules encoding fragments, homologs, derivatives and analogs of an NOVX protein of SEQ ID NOS: 2, 4, 6, 8, 10, 12, 14, 16, 18, 20, 22, 24, 26, 28, 30, or 32, or antisense nucleic acids complementary to an NOVX nucleic acid sequence of SEQ ID NOS: 1, 3, 5, 7, 9, 11, 13, 15, 17, 19, 21, 23, 25, 27, 29, and 31, are additionally provided.

[0386] In one embodiment, an antisense nucleic acid molecule is antisense to a “coding region” of the coding strand of a nucleotide sequence encoding an NOVX protein. The term “coding region” refers to the region of the nucleotide sequence comprising codons which are translated into amino acid residues. In another embodiment, the antisense nucleic acid molecule is antisense to a “noncoding region” of the coding strand of a nucleotide sequence encoding the NOVX protein. The term “noncoding region” refers to 5′ and 3′ sequences which flank the coding region that are not translated into amino acids (i.e., also referred to as 5′ and 3′ untranslated regions).

[0387] Given the coding strand sequences encoding the NOVX protein disclosed herein, antisense nucleic acids of the invention can be designed according to the rules of Watson and Crick or Hoogsteen base pairing. The antisense nucleic acid molecule can be complementary to the entire coding region of NOVX mRNA, but more preferably is an oligonucleotide that is antisense to only a portion of the coding or noncoding region of NOVX mRNA. For example, the antisense oligonucleotide can be complementary to the region surrounding the translation start site of NOVX mRNA. An antisense oligonucleotide can be, for example, about 5, 10, 15, 20, 25, 30, 35, 40, 45 or 50 nucleotides in length. An antisense nucleic acid of the invention can be constructed using chemical synthesis or enzymatic ligation reactions using procedures known in the art. For example, an antisense nucleic acid (e.g., an antisense oligonucleotide) can be chemically synthesized using naturally-occurring nucleotides or variously modified nucleotides designed to increase the biological stability of the molecules or to increase the physical stability of the duplex formed between the antisense and sense nucleic acids (e.g., phosphorothioate derivatives and acridine substituted nucleotides can be used).

[0388] Examples of modified nucleotides that can be used to generate the antisense nucleic acid include: 5-fluorouracil, 5-bromouracil, 5-chlorouracil, 5-iodouracil, hypoxanthine, xanthine, 4-acetylcytosine, 5-(carboxyhydroxylmethyl) uracil, 5-carboxymethylaminomethyl-2-thiouridine, 5-carboxymethylaminomethyluracil, dihydrouracil, beta-D-galactosylqueosine, inosine, N6-isopentenyladenine, 1-methylguanine, 1-methylinosine, 2,2-dimethylguanine, 2-methyladenine, 2-methylguanine, 3-methylcytosine, 5-methylcytosine, N6-adenine, 7-methylguanine, 5-methylaminomethyluracil, 5-methoxyaminomethyl-2-thiouracil, beta-D-mannosylqueosine, 5′-methoxycarboxymethyluracil, 5-methoxyuracil, 2-methylthio-N6-isopentenyladenine, uracil-5-oxyacetic acid (v), wybutoxosine, pseudouracil, queosine, 2-thiocytosine, 5-methyl-2-thiouracil, 2-thiouracil, 4-thiouracil, 5-methyluracil, uracil-5-oxyacetic acid methylester, uracil-5-oxyacetic acid (v), 5-methyl-2-thiouracil, 3-(3-amino-3-N-2-carboxypropyl) uracil, (acp3)w, and 2,6-diaminopurine. Alternatively, the antisense nucleic acid can be produced biologically using an expression vector into which a nucleic acid has been subcloned in an antisense orientation (i.e., RNA transcribed from the inserted nucleic acid will be of an antisense orientation to a target nucleic acid of interest, described further in the following subsection).

[0389] The antisense nucleic acid molecules of the invention are typically administered to a subject or generated in situ such that they hybridize with or bind to cellular mRNA and/or genomic DNA encoding an NOVX protein to thereby inhibit expression of the protein (e.g., by inhibiting transcription and/or translation). The hybridization can be by conventional nucleotide complementarity to form a stable duplex, or, for example, in the case of an antisense nucleic acid molecule that binds to DNA duplexes, through specific interactions in the major groove of the double helix. An example of a route of administration of antisense nucleic acid molecules of the invention includes direct injection at a tissue site. Alternatively, antisense nucleic acid molecules can be modified to target selected cells and then administered systemically. For example, for systemic administration, antisense molecules can be modified such that they specifically bind to receptors or antigens expressed on a selected cell surface (e.g., by linking the antisense nucleic acid molecules to peptides or antibodies that bind to cell surface receptors or antigens). The antisense nucleic acid molecules can also be delivered to cells using the vectors described herein. To achieve sufficient nucleic acid molecules, vector constructs in which the antisense nucleic acid molecule is placed under the control of a strong pol II or pol III promoter are preferred.

[0390] In yet another embodiment, the antisense nucleic acid molecule of the invention is an α-anomeric nucleic acid molecule. An α-anomeric nucleic acid molecule forms specific double-stranded hybrids with complementary RNA in which, contrary to the usual β-units, the strands run parallel to each other. See, e.g., Gaultier, et al., 1987. Nucl. Acids Res. 15: 6625-6641. The antisense nucleic acid molecule can also comprise a 2′-o-methylribonucleotide (See, e.g., Inoue, et al. 1987. Nucl. Acids Res. 15: 6131-6148) or a chimeric RNA-DNA analogue (See, e.g., Inoue, et al., 1987. FEBS Lett. 215: 327-330.

[0391] Ribozymes and PNA Moieties

[0392] Nucleic acid modifications include, by way of non-limiting example, modified bases, and nucleic acids whose sugar phosphate backbones are modified or derivatized. These modifications are carried out at least in part to enhance the chemical stability of the modified nucleic acid, such that they may be used, for example, as antisense binding nucleic acids in therapeutic applications in a subject.

[0393] In one embodiment, an antisense nucleic acid of the invention is a ribozyme. Ribozymes are catalytic RNA molecules with ribonuclease activity that are capable of cleaving a single-stranded nucleic acid, such as an mRNA, to which they have a complementary region. Thus, ribozymes (e.g., hammerhead ribozymes as described in Haselhoff and Gerlach 1988. Nature 334: 585-591) can be used to catalytically cleave NOVX mRNA transcripts to thereby inhibit translation of NOVX mRNA. A ribozyme having specificity for an NOVX-encoding nucleic acid can be designed based upon the nucleotide sequence of an NOVX cDNA disclosed herein (i.e., SEQ ID NOS: 1, 3, 5, 7, 9, 11, 13, 15, 17, 19, 21, 23, 25, 27, 29, and 31). For example, a derivative of a Tetrahymena L-19 IVS RNA can be constructed in which the nucleotide sequence of the active site is complementary to the nucleotide sequence to be cleaved in an NOVX-encoding mRNA. See, e.g., U.S. Pat. No. 4,987,071 to Cech, et al. and U.S. Pat. No. 5,116,742 to Cech, et al. NOVX mRNA can also be used to select a catalytic RNA having a specific ribonuclease activity from a pool of RNA molecules. See, e.g., Bartel et al., (1993) Science 261:1411-1418.

[0394] Alternatively, NOVX gene expression can be inhibited by targeting nucleotide sequences complementary to the regulatory region of the NOVX nucleic acid (e.g., the NOVX promoter and/or enhancers) to form triple helical structures that prevent transcription of the NOVX gene in target cells. See, e.g., Helene, 1991. Anticancer Drug Des. 6: 569-84; Helene, et al. 1992. Ann. N.Y. Acad. Sci. 660: 27-36; Maher, 1992. Bioassays 14: 807-15.

[0395] In various embodiments, the NOVX nucleic acids can be modified at the base moiety, sugar moiety or phosphate backbone to improve, e.g., the stability, hybridization, or solubility of the molecule. For example, the deoxyribose phosphate backbone of the nucleic acids can be modified to generate peptide nucleic acids. See, e.g., Hyrup, et al., 1996. Bioorg Med Chem 4: 5-23. As used herein, the terms “peptide nucleic acids” or “PNAs” refer to nucleic acid mimics (e.g., DNA mimics) in which the deoxyribose phosphate backbone is replaced by a pseudopeptide backbone and only the four natural nucleobases are retained. The neutral backbone of PNAs has been shown to allow for specific hybridization to DNA and RNA under conditions of low ionic strength. The synthesis of PNA oligomers can be performed using standard solid phase peptide synthesis protocols as described in Hyrup, et al., 1996. supra; Perry-O'Keefe, et al., 1996. Proc. Natl. Acad. Sci. USA 93: 14670-14675.

[0396] PNAs of NOVX can be used in therapeutic and diagnostic applications. For example, PNAs can be used as antisense or antigene agents for sequence-specific modulation of gene expression by, e.g., inducing transcription or translation arrest or inhibiting replication. PNAs of NOVX can also be used, for example, in the analysis of single base pair mutations in a gene (e.g., PNA directed PCR clamping; as artificial restriction enzymes when used in combination with other enzymes, e.g., S₁ nucleases (See, Hyrup, et al., 1996.supra); or as probes or primers for DNA sequence and hybridization (See, Hyrup, et al., 1996, supra; Perry-O'Keefe, et al., 1996. supra).

[0397] In another embodiment, PNAs of NOVX can be modified, e.g., to enhance their stability or cellular uptake, by attaching lipophilic or other helper groups to PNA, by the formation of PNA-DNA chimeras, or by the use of liposomes or other techniques of drug delivery known in the art. For example, PNA-DNA chimeras of NOVX can be generated that may combine the advantageous properties of PNA and DNA. Such chimeras allow DNA recognition enzymes (e.g., RNase H and DNA polymerases) to interact with the DNA portion while the PNA portion would provide high binding affinity and specificity. PNA-DNA chimeras can be linked using linkers of appropriate lengths selected in terms of base stacking, number of bonds between the nucleobases, and orientation (see, Hyrup, et al., 1996. supra). The synthesis of PNA-DNA chimeras can be performed as described in Hyrup, et al., 1996. supra and Finn, et al., 1996. Nucl Acids Res 24: 3357-3363. For example, a DNA chain can be synthesized on a solid support using standard phosphoramidite coupling chemistry, and modified nucleoside analogs, e.g., 5′-(4-methoxytrityl)amino-5′-deoxy-thymidine phosphoramidite, can be used between the PNA and the 5′ end of DNA. See, e.g., Mag, et al., 1989. Nucl Acid Res 17: 5973-5988. PNA monomers are then coupled in a stepwise manner to produce a chimeric molecule with a 5′ PNA segment and a 3′ DNA segment. See, e.g., Finn, et al., 1996. supra. Alternatively, chimeric molecules can be synthesized with a 5′ DNA segment and a 3′ PNA segment. See, e.g., Petersen, et al., 1975. Bioorg. Med. Chem. Lett. 5: 1119-11124.

[0398] In other embodiments, the oligonucleotide may include other appended groups such as peptides (e.g., for targeting host cell receptors in vivo), or agents facilitating transport across the cell membrane (see, e.g., Letsinger, et al., 1989. Proc. Natl. Acad. Sci. U.S.A. 86: 6553-6556; Lemaitre, et al., 1987. Proc. Natl. Acad. Sci. 84: 648-652; PCT Publication No. WO88/09810) or the blood-brain barrier (see, e.g., PCT Publication No. WO 89/10134). In addition, oligonucleotides can be modified with hybridization triggered cleavage agents (see, e.g., Krol, et al., 1988. BioTechniques 6:958-976) or intercalating agents (see, e.g., Zon, 1988. Pharm. Res. 5: 539-549). To this end, the oligonucleotide may be conjugated to another molecule, e.g., a peptide, a hybridization triggered cross-linking agent, a transport agent, a hybridization-triggered cleavage agent, and the like.

[0399] NOVX Polypeptides

[0400] A polypeptide according to the invention includes a polypeptide including the amino acid sequence of NOVX polypeptides whose sequences are provided in SEQ ID NOS: 2, 4, 6, 8, 10, 12, 14, 16, 18, 20, 22, 24, 26, 28, 30, or 32. The invention also includes a mutant or variant protein any of whose residues may be changed from the corresponding residues shown in SEQ ID NOS: 2, 4, 6, 8, 10, 12, 14, 16, 18, 20, 22, 24, 26, 28, 30, or 32 while still encoding a protein that maintains its NOVX activities and physiological functions, or a functional fragment thereof.

[0401] In general, an NOVX variant that preserves NOVX-like function includes any variant in which residues at a particular position in the sequence have been substituted by other amino acids, and further include the possibility of inserting an additional residue or residues between two residues of the parent protein as well as the possibility of deleting one or more residues from the parent sequence. Any amino acid substitution, insertion, or deletion is encompassed by the invention. In favorable circumstances, the substitution is a conservative substitution as defined above.

[0402] One aspect of the invention pertains to isolated NOVX proteins, and biologically-active portions thereof, or derivatives, fragments, analogs or homologs thereof. Also provided are polypeptide fragments suitable for use as immunogens to raise anti-NOVX antibodies. In one embodiment, native NOVX proteins can be isolated from cells or tissue sources by an appropriate purification scheme using standard protein purification techniques. In another embodiment, NOVX proteins are produced by recombinant DNA techniques. Alternative to recombinant expression, an NOVX protein or polypeptide can be synthesized chemically using standard peptide synthesis techniques.

[0403] An “isolated” or “purified” polypeptide or protein or biologically-active portion thereof is substantially free of cellular material or other contaminating proteins from the cell or tissue source from which the NOVX protein is derived, or substantially free from chemical precursors or other chemicals when chemically synthesized. The language “substantially free of cellular material” includes preparations of NOVX proteins in which the protein is separated from cellular components of the cells from which it is isolated or recombinantly-produced. In one embodiment, the language “substantially free of cellular material” includes preparations of NOVX proteins having less than about 30% (by dry weight) of non-NOVX proteins (also referred to herein as a “contaminating protein”), more preferably less than about 20% of non-NOVX proteins, still more preferably less than about 10% of non-NOVX proteins, and most preferably less than about 5% of non-NOVX proteins. When the NOVX protein or biologically-active portion thereof is recombinantly-produced, it is also preferably substantially free of culture medium, i.e., culture medium represents less than about 20%, more preferably less than about 10%, and most preferably less than about 5% of the volume of the NOVX protein preparation.

[0404] The language “substantially free of chemical precursors or other chemicals” includes preparations of NOVX proteins in which the protein is separated from chemical precursors or other chemicals that are involved in the synthesis of the protein. In one embodiment, the language “substantially free of chemical precursors or other chemicals” includes preparations of NOVX proteins having less than about 30% (by dry weight) of chemical precursors or non-NOVX chemicals, more preferably less than about 20% chemical precursors or non-NOVX chemicals, still more preferably less than about 10% chemical precursors or non-NOVX chemicals, and most preferably less than about 5% chemical precursors or non-NOVX chemicals.

[0405] Biologically-active portions of NOVX proteins include peptides comprising amino acid sequences sufficiently homologous to or derived from the amino acid sequences of the NOVX proteins (e.g., the amino acid sequence shown in SEQ ID NOS: 2, 4, 6, 8, 10, 12, 14, 16, 18, 20, 22, 24, 26, 28, 30, or 32) that include fewer amino acids than the full-length NOVX proteins, and exhibit at least one activity of an NOVX protein. Typically, biologically-active portions comprise a domain or motif with at least one activity of the NOVX protein. A biologically-active portion of an NOVX protein can be a polypeptide which is, for example, 10, 25, 50, 100 or more amino acid residues in length.

[0406] Moreover, other biologically-active portions, in which other regions of the protein are deleted, can be prepared by recombinant techniques and evaluated for one or more of the functional activities of a native NOVX protein.

[0407] In an embodiment, the NOVX protein has an amino acid sequence shown SEQ ID NOS: 2, 4, 6, 8, 10, 12, 14, 16, 18, 20, 22, 24, 26, 28, 30, or 32. In other embodiments, the NOVX protein is substantially homologous to SEQ ID NOS: 2, 4, 6, 8, 10, 12, 14, 16, 18, 20, 22, 24, 26, 28, 30, or 32, and retains the functional activity of the protein of SEQ ID NOS: 2, 4, 6, 8, 10, 12, 14, 16, 18, 20, 22, 24, 26, 28, 30, or 32, yet differs in amino acid sequence due to natural allelic variation or mutagenesis, as described in detail, below. Accordingly, in another embodiment, the NOVX protein is a protein that comprises an amino acid sequence at least about 45% homologous to the amino acid sequence SEQ ID NOS: 2, 4, 6, 8, 10, 12, 14, 16, 18, 20, 22, 24, 26, 28, 30, or 32, and retains the functional activity of the NOVX proteins of SEQ ID NOS: 2, 4, 6, 8, 10, 12, 14, 16, 18, 20, 22, 24, 26, 28, 30, or 32.

[0408] Determining Homology Between Two or More Sequences

[0409] To determine the percent homology of two amino acid sequences or of two nucleic acids, the sequences are aligned for optimal comparison purposes (e.g., gaps can be introduced in the sequence of a first amino acid or nucleic acid sequence for optimal alignment with a second amino or nucleic acid sequence). The amino acid residues or nucleotides at corresponding amino acid positions or nucleotide positions are then compared. When a position in the first sequence is occupied by the same amino acid residue or nucleotide as the corresponding position in the second sequence, then the molecules are homologous at that position (i.e., as used herein amino acid or nucleic acid “homology” is equivalent to amino acid or nucleic acid “identity”).

[0410] The nucleic acid sequence homology may be determined as the degree of identity between two sequences. The homology may be determined using computer programs known in the art, such as GAP software provided in the GCG program package. See, Needleman and Wunsch, 1970. J Mol Biol 48: 443-453. Using GCG GAP software with the following settings for nucleic acid sequence comparison: GAP creation penalty of 5.0 and GAP extension penalty of 0.3, the coding region of the analogous nucleic acid sequences referred to above exhibits a degree of identity preferably of at least 70%, 75%, 80%, 85%, 90%, 95%, 98%, or 99%, with the CDS (encoding) part of the DNA sequence shown in SEQ ID NOS: 1, 3, 5, 7, 9, 11, 13, 15, 17, 19, 21, 23, 25, 27, 29,and31.

[0411] The term “sequence identity” refers to the degree to which two polynucleotide or polypeptide sequences are identical on a residue-by-residue basis over a particular region of comparison. The term “percentage of sequence identity” is calculated by comparing two optimally aligned sequences over that region of comparison, determining the number of positions at which the identical nucleic acid base (e.g., A, T, C, G, U, or I, in the case of nucleic acids) occurs in both sequences to yield the number of matched positions, dividing the number of matched positions by the total number of positions in the region of comparison (i.e., the window size), and multiplying the result by 100 to yield the percentage of sequence identity. The term “substantial identity” as used herein denotes a characteristic of a polynucleotide sequence, wherein the polynucleotide comprises a sequence that has at least 80 percent sequence identity, preferably at least 85 percent identity and often 90 to 95 percent sequence identity, more usually at least 99 percent sequence identity as compared to a reference sequence over a comparison region.

[0412] Chimeric and Fusion Proteins

[0413] The invention also provides NOVX chimeric or fusion proteins. As used herein, an NOVX “chimeric protein” or “fusion protein” comprises an NOVX polypeptide operatively-linked to a non-NOVX polypeptide. An “NOVX polypeptide” refers to a polypeptide having an amino acid sequence corresponding to an NOVX protein SEQ ID NOS: 2, 4, 6, 8, 10, 12, 14, 16, 18, 20, 22, 24, 26, 28, 30, or 32, whereas a “non-NOVX polypeptide” refers to a polypeptide having an amino acid sequence corresponding to a protein that is not substantially homologous to the NOVX protein, e.g., a protein that is different from the NOVX protein and that is derived from the same or a different organism. Within an NOVX fusion protein the NOVX polypeptide can correspond to all or a portion of an NOVX protein. In one embodiment, an NOVX fusion protein comprises at least one biologically-active portion of an NOVX protein. In another embodiment, an NOVX fusion protein comprises at least two biologically-active portions of an NOVX protein. In yet another embodiment, an NOVX fusion protein comprises at least three biologically-active portions of an NOVX protein. Within the fusion protein, the term “operatively-linked” is intended to indicate that the NOVX polypeptide and the non-NOVX polypeptide are fused in-frame with one another. The non-NOVX polypeptide can be fused to the N-terminus or C-terminus of the NOVX polypeptide.

[0414] In one embodiment, the fusion protein is a GST-NOVX fusion protein in which the NOVX sequences are fused to the C-terminus of the GST (glutathione S-transferase) sequences. Such fusion proteins can facilitate the purification of recombinant NOVX polypeptides.

[0415] In another embodiment, the fusion protein is an NOVX protein containing a heterologous signal sequence at its N-terminus. In certain host cells (e.g., mammalian host cells), expression and/or secretion of NOVX can be increased through use of a heterologous signal sequence.

[0416] In yet another embodiment, the fusion protein is an NOVX-immunoglobulin fusion protein in which the NOVX sequences are fused to sequences derived from a member of the immunoglobulin protein family. The NOVX-immunoglobulin fusion proteins of the invention can be incorporated into pharmaceutical compositions and administered to a subject to inhibit an interaction between an NOVX ligand and an NOVX protein on the surface of a cell, to thereby suppress NOVX-mediated signal transduction in vivo. The NOVX-immunoglobulin fusion proteins can be used to affect the bioavailability of an NOVX cognate ligand. Inhibition of the NOVX ligand/NOVX interaction may be useful therapeutically for both the treatment of proliferative and differentiative disorders, as well as modulating (e.g. promoting or inhibiting) cell survival. Moreover, the NOVX-immunoglobulin fusion proteins of the invention can be used as immunogens to produce anti-NOVX antibodies in a subject, to purify NOVX ligands, and in screening assays to identify molecules that inhibit the interaction of NOVX with an NOVX ligand.

[0417] An NOVX chimeric or fusion protein of the invention can be produced by standard recombinant DNA techniques. For example, DNA fragments coding for the different polypeptide sequences are ligated together in-frame in accordance with conventional techniques, e.g., by employing blunt-ended or stagger-ended termini for ligation, restriction enzyme digestion to provide for appropriate termini, filling-in of cohesive ends as appropriate, alkaline phosphatase treatment to avoid undesirable joining, and enzymatic ligation. In another embodiment, the fusion gene can be synthesized by conventional techniques including automated DNA synthesizers. Alternatively, PCR amplification of gene fragments can be carried out using anchor primers that give rise to complementary overhangs between two consecutive gene fragments that can subsequently be annealed and reamplified to generate a chimeric gene sequence (see, e.g., Ausubel, et al. (eds.) CURRENT PROTOCOLS IN MOLECULAR BIOLOGY, John Wiley & Sons, 1992). Moreover, many expression vectors are commercially available that already encode a fusion moiety (e.g., a GST polypeptide). An NOVX-encoding nucleic acid can be cloned into such an expression vector such that the fusion moiety is linked in-frame to the NOVX protein.

[0418] NOVX Agonists and Antagonists

[0419] The invention also pertains to variants of the NOVX proteins that function as either NOVX agonists (i.e., mimetics) or as NOVX antagonists. Variants of the NOVX protein can be generated by mutagenesis (e.g., discrete point mutation or truncation of the NOVX protein). An agonist of the NOVX protein can retain substantially the same, or a subset of, the biological activities of the naturally occurring form of the NOVX protein. An antagonist of the NOVX protein can inhibit one or more of the activities of the naturally occurring form of the NOVX protein by, for example, competitively binding to a downstream or upstream member of a cellular signaling cascade which includes the NOVX protein. Thus, specific biological effects can be elicited by treatment with a variant of limited function. In one embodiment, treatment of a subject with a variant having a subset of the biological activities of the naturally occurring form of the protein has fewer side effects in a subject relative to treatment with the naturally occurring form of the NOVX proteins.

[0420] Variants of the NOVX proteins that function as either NOVX agonists (i.e., mimetics) or as NOVX antagonists can be identified by screening combinatorial libraries of mutants (e.g., truncation mutants) of the NOVX proteins for NOVX protein agonist or antagonist activity. In one embodiment, a variegated library of NOVX variants is generated by combinatorial mutagenesis at the nucleic acid level and is encoded by a variegated gene library. A variegated library of NOVX variants can be produced by, for example, enzymatically ligating a mixture of synthetic oligonucleotides into gene sequences such that a degenerate set of potential NOVX sequences is expressible as individual polypeptides, or alternatively, as a set of larger fusion proteins (e.g., for phage display) containing the set of NOVX sequences therein. There are a variety of methods which can be used to produce libraries of potential NOVX variants from a degenerate oligonucleotide sequence. Chemical synthesis of a degenerate gene sequence can be performed in an automatic DNA synthesizer, and the synthetic gene then ligated into an appropriate expression vector. Use of a degenerate set of genes allows for the provision, in one mixture, of all of the sequences encoding the desired set of potential NOVX sequences. Methods for synthesizing degenerate oligonucleotides are well-known within the art. See, e.g., Narang, 1983. Tetrahedron 39: 3; Itakura, et al., 1984. Annu. Rev. Biochem. 53: 323; Itakura, et al., 1984. Science 198: 1056; Ike, et al., 1983. Nucl. Acids Res. 11: 477.

[0421] Polypeptide Libraries

[0422] In addition, libraries of fragments of the NOVX protein coding sequences can be used to generate a variegated population of NOVX fragments for screening and subsequent selection of variants of an NOVX protein. In one embodiment, a library of coding sequence fragments can be generated by treating a double stranded PCR fragment of an NOVX coding sequence with a nuclease under conditions wherein nicking occurs only about once per molecule, denaturing the double stranded DNA, renaturing the DNA to form double-stranded DNA that can include sense/antisense pairs from different nicked products, removing single stranded portions from reformed duplexes by treatment with SI nuclease, and ligating the resulting fragment library into an expression vector. By this method, expression libraries can be derived which encodes N-terminal and internal fragments of various sizes of the NOVX proteins.

[0423] Various techniques are known in the art for screening gene products of combinatorial libraries made by point mutations or truncation, and for screening cDNA libraries for gene products having a selected property. Such techniques are adaptable for rapid screening of the gene libraries generated by the combinatorial mutagenesis of NOVX proteins. The most widely used techniques, which are amenable to high throughput analysis, for screening large gene libraries typically include cloning the gene library into replicable expression vectors, transforming appropriate cells with the resulting library of vectors, and expressing the combinatorial genes under conditions in which detection of a desired activity facilitates isolation of the vector encoding the gene whose product was detected. Recursive ensemble mutagenesis (REM), a new technique that enhances the frequency of functional mutants in the libraries, can be used in combination with the screening assays to identify NOVX variants. See, e.g., Arkin and Yourvan, 1992. Proc. Natl. Acad. Sci. USA 89: 7811-7815; Delgrave, et al., 1993. Protein Engineering 6:327-331.

[0424] Anti-NOVX Antibodies

[0425] Also included in the invention are antibodies to NOVX proteins, or fragments of NOVX proteins. The term “antibody” as used herein refers to immunoglobulin molecules and immunologically active portions of immunoglobulin (Ig) molecules, i.e., molecules that contain an antigen binding site that specifically binds (immunoreacts with) an antigen. Such antibodies include, but are not limited to, polyclonal, monoclonal, chimeric, single chain, F_{ab}, F_{ab′} and F(_{ab′})₂ fragments, and an F_{ab} expression library. In general, an antibody molecule obtained from humans relates to any of the classes IgG, IgM, IgA, IgE and IgD, which differ from one another by the nature of the heavy chain present in the molecule. Certain classes have subclasses as well, such as IgG₁, IgG₂, and others. Furthermore, in humans, the light chain may be a kappa chain or a lambda chain. Reference herein to antibodies includes a reference to all such classes, subclasses and types of human antibody species.

[0426] An isolated NOVX-related protein of the invention may be intended to serve as an antigen, or a portion or fragment thereof, and additionally can be used as an immunogen to generate antibodies that immunospecifically bind the antigen, using standard techniques for polyclonal and monoclonal antibody preparation. The full-length protein can be used or, alternatively, the invention provides antigenic peptide fragments of the antigen for use as immunogens. An antigenic peptide fragment comprises at least 6 amino acid residues of the amino acid sequence of the full length protein and encompasses an epitope thereof such that an antibody raised against the peptide forms a specific immune complex with the full length protein or with any fragment that contains the epitope. Preferably, the antigenic peptide comprises at least 10 amino acid residues, or at least 15 amino acid residues, or at least 20 amino acid residues, or at least 30 amino acid residues. Preferred epitopes encompassed by the antigenic peptide are regions of the protein that are located on its surface; commonly these are hydrophilic regions.

[0427] In certain embodiments of the invention, at least one epitope encompassed by the antigenic peptide is a region of NOVX-related protein that is located on the surface of the protein, e.g., a hydrophilic region. A hydrophobicity analysis of the human NOVX-related protein sequence will indicate which regions of a NOVX-related protein are particularly hydrophilic and, therefore, are likely to encode surface residues useful for targeting antibody production. As a means for targeting antibody production, hydropathy plots showing regions of hydrophilicity and hydrophobicity may be generated by any method well known in the art, including, for example, the Kyte Doolittle or the Hopp Woods methods, either with or without Fourier transformation. See, e.g., Hopp and Woods, 1981, Proc. Nat. Acad. Sci. USA 78: 3824-3828; Kyte and Doolittle 1982, J. Mol. Biol. 157: 105-142, each of which is incorporated herein by reference in its entirety. Antibodies that are specific for one or more domains within an antigenic protein, or derivatives, fragments, analogs or homologs thereof, are also provided herein.

[0428] A protein of the invention, or a derivative, fragment, analog, homolog or ortholog thereof, may be utilized as an immunogen in the generation of antibodies that immunospecifically bind these protein components.

[0429] Various procedures known within the art may be used for the production of polyclonal or monoclonal antibodies directed against a protein of the invention, or against derivatives, fragments, analogs homologs or orthologs thereof (see, for example, Antibodies: A Laboratory Manual, Harlow and Lane, 1988, Cold Spring Harbor Laboratory Press, Cold Spring Harbor, NY, incorporated herein by reference). Some of these antibodies are discussed below.

[0430] Polyclonal Antibodies

[0431] For the production of polyclonal antibodies, various suitable host animals (e.g., rabbit, goat, mouse or other mammal) may be immunized by one or more injections with the native protein, a synthetic variant thereof, or a derivative of the foregoing. An appropriate immunogenic preparation can contain, for example, the naturally occurring immunogenic protein, a chemically synthesized polypeptide representing the immunogenic protein, or a recombinantly expressed immunogenic protein. Furthermore, the protein may be conjugated to a second protein known to be immunogenic in the mammal being immunized. Examples of such immunogenic proteins include but are not limited to keyhole limpet hemocyanin, serum albumin, bovine thyroglobulin, and soybean trypsin inhibitor. The preparation can further include an adjuvant. Various adjuvants used to increase the immunological response include, but are not limited to, Freund's (complete and incomplete), mineral gels (e.g., aluminum hydroxide), surface active substances (e.g., lysolecithin, pluronic polyols, polyanions, peptides, oil emulsions, dinitrophenol, etc.), adjuvants usable in humans such as Bacille Calmette-Guerin and Corynebacterium parvum, or similar immunostimulatory agents. Additional examples of adjuvants which can be employed include MPL-TDM adjuvant (monophosphorpl Lipid A, synthetic trehalose dicorynomycolate).

[0432] The polyclonal antibody molecules directed against the immunogenic protein can be isolated from the mammal (e.g., from the blood) and further purified by well known techniques, such as affinity chromatography using protein A or protein G, which provide primarily the IgG fraction of immune serum. Subsequently, or alternatively, the specific antigen which is the target of the immunoglobulin sought, or an epitope thereof, may be immobilized on a column to purify the immune specific antibody by immunoaffinity chromatography. Purification of immunoglobulins is discussed, for example, by D. Wilkinson (The Scientist, published by The Scientist, Inc., Philadelphia Pa., Vol. 14, No. 8 (Apr. 17, 2000), pp. 25-28).

[0433] Monoclonal Antibodies

[0434] The term “monoclonal antibody” (MAb) or “monoclonal antibody composition”, as used herein, refers to a population of antibody molecules that contain only one molecular species of antibody molecule consisting of a unique light chain gene product and a unique heavy chain gene product. In particular, the complementarity determining regions (CDRs) of the monoclonal antibody are identical in all the molecules of the population. MAbs thus contain an antigen binding site capable of immunoreacting with a particular epitope of the antigen characterized by a unique binding affinity for it.

[0435] Monoclonal antibodies can be prepared using hybridoma methods, such as those described by Kohler and Milstein, Nature, 256:495 (1975). In a hybridoma method, a mouse, hamster, or other appropriate host animal, is typically immunized with an immunizing agent to elicit lymphocytes that produce or are capable of producing antibodies that will specifically bind to the immunizing agent. Alternatively, the lymphocytes can be immunized in vitro.

[0436] The immunizing agent will typically include the protein antigen, a fragment thereof or a fusion protein thereof. Generally, either peripheral blood lymphocytes are used if cells of human origin are desired, or spleen cells or lymph node cells are used if non-human mammalian sources are desired. The lymphocytes are then fused with an immortalized cell line using a suitable fusing agent, such as polyethylene glycol, to form a hybridoma cell (Goding, MONOCLONAL ANTIBODIES: PRINCIPLES AND PRACTICE, Academic Press, (1986) pp. 59-103). Immortalized cell lines are usually transformed mammalian cells, particularly myeloma cells of rodent, bovine and human origin. Usually, rat or mouse myeloma cell lines are employed. The hybridoma cells can be cultured in a suitable culture medium that preferably contains one or more substances that inhibit the growth or survival of the unfused, immortalized cells. For example, if the parental cells lack the enzyme hypoxanthine guanine phosphoribosyl transferase (HGPRT or HPRT), the culture medium for the hybridomas typically will include hypoxanthine, aminopterin, and thymidine (“HAT medium”), which substances prevent the growth of HGPRT-deficient cells.

[0437] Preferred immortalized cell lines are those that fuse efficiently, support stable high level expression of antibody by the selected antibody-producing cells, and are sensitive to a medium such as HAT medium. More preferred immortalized cell lines are murine myeloma lines, which can be obtained, for instance, from the Salk Institute Cell Distribution Center, San Diego, Calif. and the American Type Culture Collection, Manassas, Va. Human myeloma and mouse-human heteromyeloma cell lines also have been described for the production of human monoclonal antibodies (Kozbor, J. Immunol., 133:3001 (1984); Brodeur et al., MONOCLONAL ANTIBODY PRODUCTION TECHNIQUES AND APPLICATIONS, Marcel Dekker, Inc., New York, (1987) pp. 51-63).

[0438] The culture medium in which the hybridoma cells are cultured can then be assayed for the presence of monoclonal antibodies directed against the antigen. Preferably, the binding specificity of monoclonal antibodies produced by the hybridoma cells is determined by immunoprecipitation or by an in vitro binding assay, such as radioimmunoassay (RIA) or enzyme-linked immunoabsorbent assay (ELISA). Such techniques and assays are known in the art. The binding affinity of the monoclonal antibody can, for example, be determined by the Scatchard analysis of Munson and Pollard, Anal. Biochem., 107:220 (1980). Preferably, antibodies having a high degree of specificity and a high binding affinity for the target antigen are isolated.

[0439] After the desired hybridoma cells are identified, the clones can be subcloned by limiting dilution procedures and grown by standard methods. Suitable culture media for this purpose include, for example, Dulbecco's Modified Eagle's Medium and RPMI-1640 medium. Alternatively, the hybridoma cells can be grown in vivo as ascites in a mammal.

[0440] The monoclonal antibodies secreted by the subclones can be isolated or purified from the culture medium or ascites fluid by conventional immunoglobulin purification procedures such as, for example, protein A-Sepharose, hydroxylapatite chromatography, gel electrophoresis, dialysis, or affinity chromatography.

[0441] The monoclonal antibodies can also be made by recombinant DNA methods, such as those described in U.S. Pat. No. 4,816,567. DNA encoding the monoclonal antibodies of the invention can be readily isolated and sequenced using conventional procedures (e.g., by using oligonucleotide probes that are capable of binding specifically to genes encoding the heavy and light chains of murine antibodies). The hybridoma cells of the invention serve as a preferred source of such DNA. Once isolated, the DNA can be placed into expression vectors; which are then transfected into host cells such as simian COS cells, Chinese hamster ovary (CHO) cells, or myeloma cells that do not otherwise produce immunoglobulin protein, to obtain the synthesis of monoclonal antibodies in the recombinant host cells. The DNA also can be modified, for example, by substituting the coding sequence for human heavy and light chain constant domains in place of the homologous murine sequences (U.S. Pat. No. 4,816,567; Morrison, Nature 368, 812-13 (1994)) or by covalently joining to the immunoglobulin coding sequence all or part of the coding sequence for a non-immunoglobulin polypeptide. Such a non-immunoglobulin polypeptide can be substituted for the constant domains of an antibody of the invention, or can be substituted for the variable domains of one antigen-combining site of an antibody of the invention to create a chimeric bivalent antibody.

[0442] Humanized Antibodies

[0443] The antibodies directed against the protein antigens of the invention can further comprise humanized antibodies or human antibodies. These antibodies are suitable for administration to humans without engendering an immune response by the human against the administered immunoglobulin. Humanized forms of antibodies are chimeric immunoglobulins, immunoglobulin chains or fragments thereof (such as Fv, Fab, Fab′, F(ab′)₂ or other antigen-binding subsequences of antibodies) that are principally comprised of the sequence of a human immunoglobulin, and contain minimal sequence derived from a non-human immunoglobulin. Humanization can be performed following the method of Winter and co-workers (Jones et al., Nature, 321:522-525 (1986); Riechmann et al., Nature, 332:323-327 (1988); Verhoeyen et al., Science, 239:1534-1536 (1988)), by substituting rodent CDRs or CDR sequences for the corresponding sequences of a human antibody. (See also U.S. Pat. No. 5,225,539.) In some instances, Fv framework residues of the human immunoglobulin are replaced by corresponding non-human residues. Humanized antibodies can also comprise residues which are found neither in the recipient antibody nor in the imported CDR or framework sequences. In general, the humanized antibody will comprise substantially all of at least one, and typically two, variable domains, in which all or substantially all of the CDR regions correspond to those of a non-human immunoglobulin and all or substantially all of the framework regions are those of a human immunoglobulin consensus sequence. The humanized antibody optimally also will comprise at least a portion of an immunoglobulin constant region (Fc), typically that of a human immunoglobulin (Jones et al., 1986; Riechmann et al., 1988; and Presta, Curr. Op. Struct. Biol., 2:593-596 (1992)).

[0444] Human Antibodies

[0445] Fully human antibodies relate to antibody molecules in which essentially the entire sequences of both the light chain and the heavy chain, including the CDRs, arise from human genes. Such antibodies are termed “human antibodies”, or “fully human antibodies” herein. Human monoclonal antibodies can be prepared by the trioma technique; the human B-cell hybridoma technique (see Kozbor, et al., 1983 Immunol Today 4: 72) and the EBV hybridoma technique to produce human monoclonal antibodies (see Cole, et al., 1985 In: MONOCLONAL ANTIBODIES AND CANCER THERAPY, Alan R. Liss, Inc., pp. 77-96). Human monoclonal antibodies may be utilized in the practice of the present invention and may be produced by using human hybridomas (see Cote, et al., 1983. Proc Natl Acad Sci USA 80: 2026-2030) or by transforming human B-cells with Epstein Barr Virus in vitro (see Cole, et al., 1985 In: MONOCLONAL ANTIBODIES AND CANCER THERAPY, Alan R. Liss, Inc., pp. 77-96).

[0446] In addition, human antibodies can also be produced using additional techniques, including phage display libraries (Hoogenboom and Winter, J. Mol. Biol., 227:381 (1991); Marks et al., J. Mol. Biol., 222:581 (1991)). Similarly, human antibodies can be made by introducing human immunoglobulin loci into transgenic animals, e.g., mice in which the endogenous immunoglobulin genes have been partially or completely inactivated. Upon challenge, human antibody production is observed, which closely resembles that seen in humans in all respects, including gene rearrangement, assembly, and antibody repertoire. This approach is described, for example, in U.S. Pat. Nos. 5,545,807; 5,545,806; 5,569,825; 5,625,126; 5,633,425; 5,661,016, and in Marks et al. (Bio/Technology 10, 779-783 (1992)); Lonberg et al. (Nature 368 856-859 (1994)); Morrison (Nature 368, 812-13 (1994)); Fishwild et al,( Nature Biotechnology 14, 845-51 (1996)); Neuberger (Nature Biotechnology 14, 826 (1996)); and Lonberg and Huszar (Intern. Rev. Immunol. 13 65-93 (1995)).

[0447] Human antibodies may additionally be produced using transgenic nonhuman animals which are modified so as to produce fully human antibodies rather than the animal's endogenous antibodies in response to challenge by an antigen. (See PCT publication WO94/02602). The endogenous genes encoding the heavy and light immunoglobulin chains in the nonhuman host have been incapacitated, and active loci encoding human heavy and light chain immunoglobulins are inserted into the host's genome. The human genes are incorporated, for example, using yeast artificial chromosomes containing the requisite human DNA segments. An animal which provides all the desired modifications is then obtained as progeny by crossbreeding intermediate transgenic animals containing fewer than the full complement of the modifications. The preferred embodiment of such a nonhuman animal is a mouse, and is termed the Xenomouse™ as disclosed in PCT publications WO 96/33735 and WO 96/34096. This animal produces B cells which secrete fully human immunoglobulins. The antibodies can be obtained directly from the animal after immunization with an immunogen of interest, as, for example, a preparation of a polyclonal antibody, or alternatively from immortalized B cells derived from the animal, such as hybridomas producing monoclonal antibodies. Additionally, the genes encoding the immunoglobulins with human variable regions can be recovered and expressed to obtain the antibodies directly, or can be further modified to obtain analogs of antibodies such as, for example, single chain Fv molecules.

[0448] An example of a method of producing a nonhuman host, exemplified as a mouse, lacking expression of an endogenous immunoglobulin heavy chain is disclosed in U.S. Pat. No. 5,939,598. It can be obtained by a method including deleting the J segment genes from at least one endogenous heavy chain locus in an embryonic stem cell to prevent rearrangement of the locus and to prevent formation of a transcript of a rearranged immunoglobulin heavy chain locus, the deletion being effected by a targeting vector containing a gene encoding a selectable marker; and producing from the embryonic stem cell a transgenic mouse whose somatic and germ cells contain the gene encoding the selectable marker.

[0449] A method for producing an antibody of interest, such as a human antibody, is disclosed in U.S. Pat. No. 5,916,771. It includes introducing an expression vector that contains a nucleotide sequence encoding a heavy chain into one mammalian host cell in culture, introducing an expression vector containing a nucleotide sequence encoding a light chain into another mammalian host cell, and fusing the two cells to form a hybrid cell. The hybrid cell expresses an antibody containing the heavy chain and the light chain.

[0450] In a further improvement on this procedure, a method for identifying a clinically relevant epitope on an immunogen, and a correlative method for selecting an antibody that binds immunospecifically to the relevant epitope with high affinity, are disclosed in PCT publication WO 99/53049.

[0451] F_{ab} Fragments and Single Chain Antibodies

[0452] According to the invention, techniques can be adapted for the production of single-chain antibodies specific to an antigenic protein of the invention (see e.g., U.S. Pat. No. 4,946,778). In addition, methods can be adapted for the construction of F_{ab} expression libraries (see e.g., Huse, et al., 1989 Science 246: 1275-1281) to allow rapid and effective. identification of monoclonal F_{ab} fragments with the desired specificity for a protein or derivatives, fragments, analogs or homologs thereof. Antibody fragments that contain the idiotypes to a protein antigen may be produced by techniques known in the art including, but not limited to: (i) an F(_{ab′)2} fragment produced by pepsin digestion of an antibody molecule; (ii) an F_{ab} fragment generated by reducing the disulfide bridges of an F(_{ab′)2} fragment; (iii) an F_{ab} fragment generated by the treatment of the antibody molecule with papain and a reducing agent and (iv) Fᵥ fragments.

[0453] Bispecific Antibodies

[0454] Bispecific antibodies are monoclonal, preferably human or humanized, antibodies that have binding specificities for at least two different antigens. In the present case, one of the binding specificities is for an antigenic protein of the invention. The second binding target is any other antigen, and advantageously is a cell-surface protein or receptor or receptor subunit.

[0455] Methods for making bispecific antibodies are known in the art. Traditionally, the recombinant production of bispecific antibodies is based on the co-expression of two immunoglobulin heavy-chain/light-chain pairs, where the two heavy chains have different specificities (Milstein and Cuello, Nature, 305:537-539 (1983)). Because of the random assortment of immunoglobulin heavy and light chains, these hybridomas (quadromas) produce a potential mixture of ten different antibody molecules, of which only one has the correct bispecific structure. The purification of the correct molecule is usually accomplished by affinity chromatography steps. Similar procedures are disclosed in WO 93/08829, published May 13, 1993, and in Traunecker et al., 1991 EMBO J., 10:3655-3659.

[0456] Antibody variable domains with the desired binding specificities (antibody-antigen combining sites) can be fused to immunoglobulin constant domain sequences. The fusion preferably is with an immunoglobulin heavy-chain constant domain, comprising at least part of the hinge, CH2, and CH3 regions. It is preferred to have the first heavy-chain constant region (CH1) containing the site necessary for light-chain binding present in at least one of the fusions. DNAs encoding the immunoglobulin heavy-chain fusions and, if desired, the immunoglobulin light chain, are inserted into separate expression vectors, and are co-transfected into a suitable host organism. For further details of generating bispecific antibodies see, for example, Suresh et al., Methods in Enzymology, 121:210 (1986).

[0457] According to another approach described in WO 96/27011, the interface between a pair of antibody molecules can be engineered to maximize the percentage of heterodimers which are recovered from recombinant cell culture. The preferred interface comprises at least a part of the CH3 region of an antibody constant domain. In this method, one or more small amino acid side chains from the interface of the first antibody molecule are replaced with larger side chains (e.g. tyrosine or tryptophan). Compensatory “cavities” of identical or similar size to the large side chain(s) are created on the interface of the second antibody molecule by replacing large amino acid side chains with smaller ones (e.g. alanine or threonine). This provides a mechanism for increasing the yield of the heterodimer over other unwanted end-products such as homodimers.

[0458] Bispecific antibodies can be prepared as full length antibodies or antibody fragments (e.g. F(ab′)₂ bispecific antibodies). Techniques for generating bispecific antibodies from antibody fragments have been described in the literature. For example, bispecific antibodies can be prepared using chemical linkage. Brennan et al., Science 229:81,(1985) describe a procedure wherein intact antibodies are proteolytically cleaved to generate F(ab′)₂ fragments.

[0459] These fragments are reduced in the presence of the dithiol com26S protease regulatory subunit 4 g agent sodium arsenite to stabilize vicinal dithiols and prevent intermolecular disulfide formation. The Fab′ fragments generated are then converted to thionitrobenzoate (TNB) derivatives. One of the Fab′-TNB derivatives is then reconverted to the Fab′-thiol by reduction with mercaptoethylamine and is mixed with an equimolar amount of the other Fab′-TNB derivative to form the bispecific antibody. The bispecific antibodies produced can be used as agents for the selective immobilization of enzymes.

[0460] Additionally, Fab′ fragments can be directly recovered from E. coli and chemically coupled to form bispecific antibodies. Shalaby et al., J. Exp. Med. 175:217-225 (1992) describe the production of a fully humanized bispecific antibody F(ab′)₂ molecule. Each Fab′ fragment was separately secreted from E. coli and subjected to directed chemical coupling in vitro to form the bispecific antibody. The bispecific antibody thus formed was able to bind to cells overexpressing the ErbB2 receptor and normal human T cells, as well as trigger the lytic activity of human cytotoxic lymphocytes against human breast tumor targets.

[0461] Various techniques for making and isolating bispecific antibody fragments directly from recombinant cell culture have also been described. For example, bispecific antibodies have been produced using leucine zippers. Kostelny et al., J. Immunol. 148(5): 1547-1553 (1992). The leucine zipper peptides from the Fos and Jun proteins were linked to the Fab′ portions of two different antibodies by gene fusion. The antibody homodimers were reduced at the hinge region to form monomers and then re-oxidized to form the antibody heterodimers. This method can also be utilized for the production of antibody homodimers. The “diabody” technology described by Hollinger et al., Proc. Natl. Acad. Sci. USA 90:6444-6448 (1993) has provided an alternative mechanism for making bispecific antibody fragments. The fragments comprise a heavy-chain variable domain (V_{H}) connected to a light-chain variable domain (V_{L}) by a linker which is too short to allow pairing between the two domains on the same chain. Accordingly, the V_{H} and V_{L} domains of one fragment are forced to pair with the complementary V_{L} and V_{H} domains of another fragment, thereby forming two antigen-binding sites. Another strategy for making bispecific antibody fragments by the use of single-chain Fv (sFv) dimers has also been reported. See, Gruber et al., J. Immunol. 152:5368 (1994).

[0462] Antibodies with more than two valencies are contemplated. For example, trispecific antibodies can be prepared. Tutt et al., J. Immunol. 147:60 (1991).

[0463] Exemplary bispecific antibodies can bind to two different epitopes, at least one of which originates in the protein antigen of the invention. Alternatively, an anti-antigenic arm of an immunoglobulin molecule can be combined with an arm which binds to a triggering molecule on a leukocyte such as a T-cell receptor molecule (e.g. CD2, CD3, CD28, or B7), or Fc receptors for IgG (FcγR), such as FcγRI (CD64), FcγRII (CD32) and FcγRI (CD16) so as to focus cellular defense mechanisms to the cell expressing the particular antigen. Bispecific antibodies can also be used to direct cytotoxic agents to cells which express a particular antigen. These antibodies possess an antigen-binding arm and an arm which binds a cytotoxic agent or a radionuclide chelator, such as EOTUBE, DPTA, DOTA, or TETA. Another bispecific antibody of interest binds the protein antigen described herein and further binds tissue factor (TF).

[0464] Heteroconjugate Antibodies

[0465] Heteroconjugate antibodies are also within the scope of the present invention. Heteroconjugate antibodies are composed of two covalently joined antibodies. Such antibodies have, for example, been proposed to target immune system cells to unwanted cells (U.S. Pat. No. 4,676,980), and for treatment of HIV infection (WO 91/00360; WO 92/200373; EP 03089). It is contemplated that the antibodies can be prepared in vitro using known methods in synthetic protein chemistry, including those involving crosslinking agents. For example, immunotoxins can be constructed using a disulfide exchange reaction or by forming a thioether bond. Examples of suitable reagents for this purpose include iminothiolate and methyl-4-mercaptobutyrimidate and those disclosed, for example, in U.S. Pat. No. 4,676,980.

[0466] Effector Function Engineering

[0467] It can be desirable to modify the antibody of the invention with respect to effector function, so as to enhance, e.g., the effectiveness of the antibody in treating cancer. For example, cysteine residue(s) can be introduced into the Fc region, thereby allowing interchain disulfide bond formation in this region. The homodimeric antibody thus generated can have improved internalization capability and/or increased complement-mediated cell killing and antibody-dependent cellular cytotoxicity (ADCC). See Caron et al., J. Exp Med., 176: 1191-1195 (1992) and Shopes, J. Immunol., 148: 2918-2922 (1992). Homodimeric antibodies with enhanced anti-tumor activity can also be prepared using heterobifunctional cross-linkers as described in Wolff et al. Cancer Research, 53: 2560-2565 (1993). Alternatively, an antibody can be engineered that has dual Fc regions and can thereby have enhanced complement lysis and ADCC capabilities. See Stevenson et al., Anti-Cancer Drug Design, 3: 219-230 (1989).

[0468] Immunoconjugates

[0469] The invention also pertains to immunoconjugates comprising an antibody conjugated to a cytotoxic agent such as a chemotherapeutic agent, toxin (e.g., an enzymatically active toxin of bacterial, fungal, plant, or animal origin, or fragments thereof), or a radioactive isotope (i.e., a radioconjugate).

[0470] Chemotherapeutic agents useful in the generation of such immunoconjugates have been described above. Enzymatically active toxins and fragments thereof that can be used include diphtheria A chain, nonbinding active fragments of diphtheria toxin, exotoxin A chain (from Pseudomonas aeruginosa), ricin A chain, abrin A chain, modeccin A chain, alpha-sarcin, Aleurites fordii proteins, dianthin proteins, Phytolaca americana proteins (PAPI, PAPII, and PAP-S), momordica charantia inhibitor, curcin, crotin, sapaonaria officinalis inhibitor, gelonin, mitogellin, restrictocin, phenomycin, enomycin, and the tricothecenes. A variety of radionuclides are available for the production of radioconjugated antibodies. Examples include ²¹²Bi, ¹³¹I, ¹³¹In, ⁹⁰Y, and ¹⁸⁶Re.

[0471] Conjugates of the antibody and cytotoxic agent are made using a variety of bifunctional protein-coupling agents such as N-succinimidyl-3-(2-pyridyldithiol) propionate (SPDP), iminothiolane (IT), bifunctional derivatives of imidoesters (such as dimethyl adipimidate HCL), active esters (such as disuccinimidyl suberate), aldehydes (such as glutareldehyde), bis-azido compounds (such as bis (p-azidobenzoyl) hexanediamine), bis-diazonium derivatives (such as bis-(p-diazoniumbenzoyl)-ethylenediamine), diisocyanates (such as tolyene 2,6-diisocyanate), and bis-active fluorine compounds (such as 1,5-difluoro-2,4-dinitrobenzene). For example, a ricin immunotoxin can be prepared as described in Vitetta et al., Science, 238: 1098 (1987). Carbon-14-labeled 1-isothiocyanatobenzyl-3-methyldiethylene triaminepentaacetic acid (MX-DTPA) is an exemplary chelating agent for conjugation of radionucleotide to the antibody. See WO94/11026.

[0472] In another embodiment, the antibody can be conjugated to a “receptor” (such streptavidin) for utilization in tumor pretargeting wherein the antibody-receptor conjugate is administered to the patient, followed by removal of unbound conjugate from the circulation using a clearing agent and then administration of a “ligand” (e.g., avidin) that is in turn conjugated to a cytotoxic agent.

[0473] In one embodiment, methods for the screening of antibodies that possess the desired specificity include, but are not limited to, enzyme-linked immunosorbent assay (ELISA) and other immunologically-mediated techniques known within the art. In a specific embodiment, selection of antibodies that are specific to a particular domain of an NOVX protein is facilitated by generation of hybridomas that bind to the fragment of an NOVX protein possessing such a domain. Thus, antibodies that are specific for a desired domain within an NOVX protein, or derivatives, fragments, analogs or homologs thereof, are also provided herein.

[0474] Anti-NOVX antibodies may be used in methods known within the art relating to the localization and/or quantitation of an NOVX protein (e.g., for use in measuring levels of the NOVX protein within appropriate physiological samples, for use in diagnostic methods, for use in imaging the protein, and the like). In a given embodiment, antibodies for NOVX proteins, or derivatives, fragments, analogs or homologs thereof, that contain the antibody derived binding domain, are utilized as pharmacologically-active compounds (hereinafter “Therapeutics”).

[0475] An anti-NOVX antibody (e.g., monoclonal antibody) can be used to isolate an NOVX polypeptide by standard techniques, such as affinity chromatography or immunoprecipitation. An anti-NOVX antibody can facilitate the purification of natural NOVX polypeptide from cells and of recombinantly-produced NOVX polypeptide expressed in host cells. Moreover, an anti-NOVX antibody can be used to detect NOVX protein (e.g., in a cellular lysate or cell supernatant) in order to evaluate the abundance and pattern of expression of the NOVX protein. Anti-NOVX antibodies can be used diagnostically to monitor protein levels in tissue as part of a clinical testing procedure, e.g., to, for example, determine the efficacy of a given treatment regimen. Detection can be facilitated by coupling (i.e., physically linking) the antibody to a detectable substance. Examples of detectable substances include various enzymes, prosthetic groups, fluorescent materials, luminescent materials, bioluminescent materials, and radioactive materials. Examples of suitable enzymes include horseradish peroxidase, alkaline phosphatase, β-galactosidase, or acetylcholinesterase; examples of suitable prosthetic group complexes include streptavidin/biotin and avidin/biotin; examples of suitable fluorescent materials include umbelliferone, fluorescein, fluorescein isothiocyanate, rhodamine, dichlorotriazinylamine fluorescein, dansyl chloride or phycoerythrin; an example of a luminescent material includes luminol; examples of bioluminescent materials include luciferase, luciferin, and aequorin, and examples of suitable radioactive material include ¹²⁵I, ¹³¹I, ³⁵S or ³H.

[0476] NOVX Recombinant Expression Vectors and Host Cells

[0477] Another aspect of the invention pertains to vectors, preferably expression vectors, containing a nucleic acid encoding an NOVX protein, or derivatives, fragments, analogs or homologs thereof. As used herein, the term “vector” refers to a nucleic acid molecule capable of transporting another nucleic acid to which it has been linked. One type of vector is a “plasmid”, which refers to a circular double stranded DNA loop into which additional DNA segments can be ligated. Another type of vector is a viral vector, wherein additional DNA segments can be ligated into the viral genome. Certain vectors are capable of autonomous replication in a host cell into which they are introduced (e.g., bacterial vectors having a bacterial origin of replication and episomal mammalian vectors). Other vectors (e.g., non-episomal mammalian vectors) are integrated into the genome of a host cell upon introduction into the host cell, and thereby are replicated along with the host genome. Moreover, certain vectors are capable of directing the expression of genes to which they are operatively-linked. Such vectors are referred to herein as “expression vectors”. In general, expression vectors of utility in recombinant DNA techniques are often in the form of plasmids. In the present specification, “plasmid” and “vector” can be used interchangeably as the plasmid is the most commonly used form of vector. However, the invention is intended to include such other forms of expression vectors, such as viral vectors (e.g., replication defective retroviruses, adenoviruses and adeno-associated viruses), which serve equivalent functions.

[0478] The recombinant expression vectors of the invention comprise a nucleic acid of the invention in a form suitable for expression of the nucleic acid in a host cell, which means that the recombinant expression vectors include one or more regulatory sequences, selected on the basis of the host cells to be used for expression, that is operatively-linked to the nucleic acid sequence to be expressed. Within a recombinant expression vector, “operably-linked” is intended to mean that the nucleotide sequence of interest is linked to the regulatory sequence(s) in a manner that allows for expression of the nucleotide sequence (e.g., in an in vitro transcription/translation system or in a host cell when the vector is introduced into the host cell).

[0479] The term “regulatory sequence” is intended to includes promoters, enhancers and other expression control elements (e.g., polyadenylation signals). Such regulatory sequences are described, for example, in Goeddel, GENE EXPRESSION TECHNOLOGY: METHODS IN ENZYMOLOGY 185, Academic Press, San Diego, Calif. (1990). Regulatory sequences include those that direct constitutive expression of a nucleotide sequence in many types of host cell and those that direct expression of the nucleotide sequence only in certain host cells (e.g., tissue-specific regulatory sequences). It will be appreciated by those skilled in the art that the design of the expression vector can depend on such factors as the choice of the host cell to be transformed, the level of expression of protein desired, etc. The expression vectors of the invention can be introduced into host cells to thereby produce proteins or peptides, including fusion proteins or peptides, encoded by nucleic acids as described herein (e.g., NOVX proteins, mutant forms of NOVX proteins, fusion proteins, etc.).

[0480] The recombinant expression vectors of the invention can be designed for expression of NOVX proteins in prokaryotic or eukaryotic cells. For example, NOVX proteins can be expressed in bacterial cells such as Escherichia coli, insect cells (using baculovirus expression vectors) yeast cells or mammalian cells. Suitable host cells are discussed further in Goeddel, GENE EXPRESSION TECHNOLOGY: METHODS IN ENZYMOLOGY 185, Academic Press, San Diego, Calif. (1990). Alternatively, the recombinant expression vector can be transcribed and translated in vitro, for example using T7 promoter regulatory sequences and T7 polymerase.

[0481] Expression of proteins in prokaryotes is most often carried out in Escherichia coli with vectors containing constitutive or inducible promoters directing the expression of either fusion or non-fusion proteins. Fusion vectors add a number of amino acids to a protein encoded therein, usually to the amino terminus of the recombinant protein. Such fusion vectors typically serve three purposes: (i) to increase expression of recombinant protein; (ii) to increase the solubility of the recombinant protein; and (iii) to aid in the purification of the recombinant protein by acting as a ligand in affinity purification. Often, in fusion expression vectors, a proteolytic cleavage site is introduced at the junction of the fusion moiety and the recombinant protein to enable separation of the recombinant protein from the fusion moiety subsequent to purification of the fusion protein. Such enzymes, and their cognate recognition sequences, include Factor Xa, thrombin and enterokinase. Typical fusion expression vectors include pGEX (Pharmacia Biotech Inc; Smith and Johnson, 1988. Gene 67: 31-40), pMAL (New England Biolabs, Beverly, Mass.) and pRIT5 (Pharmacia, Piscataway, N.J.) that fuse glutathione S-transferase (GST), maltose E binding protein, or protein A, respectively, to the target recombinant protein.

[0482] Examples of suitable inducible non-fusion E. coli expression vectors include pTrc (Amrann et al., (1988) Gene 69:301-315) and pET 11d (Studier et al., GENE EXPRESSION TECHNOLOGY: METHODS IN ENZYMOLOGY 185, Academic Press, San Diego, Calif. (1990) 60-89).

[0483] One strategy to maximize recombinant protein expression in E. coli is to express the protein in a host bacteria with an impaired capacity to proteolytically cleave the recombinant protein. See, e.g., Gottesman, GENE EXPRESSION TECHNOLOGY: METHODS IN ENZYMOLOGY 185, Academic Press, San Diego, Calif. (1990) 119-128. Another strategy is to alter the nucleic acid sequence of the nucleic acid to be inserted into an expression vector so that the individual codons for each amino acid are those preferentially utilized in E. coli (see, e.g., Wada, et al., 1992. Nucl. Acids Res. 20: 2111-2118). Such alteration of nucleic acid sequences of the invention can be carried out by standard DNA synthesis techniques.

[0484] In another embodiment, the NOVX expression vector is a yeast expression vector. Examples of vectors for expression in yeast Saccharomyces cerivisae include pYepSec1 (Baldari, et al., 1987. EMBO J. 6: 229-234), pMFa (Kurjan and Herskowitz, 1982. Cell 30: 933-943), pJRY88 (Schultz et al., 1987. Gene 54: 113-123), pYES2 (Invitrogen Corporation, San Diego, Calif.), and picZ (In Vitrogen Corp, San Diego, Calif.).

[0485] Alternatively, NOVX can be expressed in insect cells using baculovirus expression vectors. Baculovirus vectors available for expression of proteins in cultured insect cells (e.g., SF9 cells) include the pAc series (Smith, et al., 1983. Mol. Cell. Biol. 3: 2156-2165) and the pVL series (Lucklow and Summers, 1989. Virology 170: 31-39).

[0486] In yet another embodiment, a nucleic acid of the invention is expressed in mammalian cells using a mammalian expression vector. Examples of mammalian expression vectors include pCDM8 (Seed, 1987. Nature 329: 840) and pMT2PC (Kaufman, et al., 1987. EMBO J. 6: 187-195). When used in mammalian cells, the expression vector's control functions are often provided by viral regulatory elements. For example, commonly used promoters are derived from polyoma, adenovirus 2, cytomegalovirus, and simian virus 40. For other suitable expression systems for both prokaryotic and eukaryotic cells see, e.g., Chapters 16 and 17 of Sambrook, et al., MOLECULAR CLONING: A LABORATORY MANUAL. 2nd ed., Cold Spring Harbor Laboratory, Cold Spring Harbor Laboratory Press, Cold Spring Harbor, N.Y., 1989.

[0487] In another embodiment, the recombinant mammalian expression vector is capable of directing expression of the nucleic acid preferentially in a particular cell type (e.g., tissue-specific regulatory elements are used to express the nucleic acid). Tissue-specific regulatory elements are known in the art. Non-limiting examples of suitable tissue-specific promoters include the albumin promoter (liver-specific; Pinkert, et al., 1987. Genes Dev. 1: 268-277), lymphoid-specific promoters (Calame and Eaton, 1988. Adv. Immunol. 43: 235-275), in particular promoters of T cell receptors (Winoto and Baltimore, 1989. EMBO J. 8: 729-733) and immunoglobulins (Banerji, et al., 1983. Cell 33: 729-740; Queen and Baltimore, 1983. Cell 33: 741-748), neuron-specific promoters (e.g., the neurofilament promoter; Byrne and Ruddle, 1989. Proc. Natl. Acad. Sci. USA 86: 5473-5477), pancreas-specific promoters (Edlund, et al., 1985. Science 230: 912-916), and mammary gland-specific promoters (e.g., milk whey promoter; U.S. Pat. No. 4,873,316 and European Application Publication No. 264,166). Developmentally-regulated promoters are also encompassed, e.g., the murine hox promoters (Kessel and Gruss, 1990. Science 249: 374-379) and the α-fetoprotein promoter (Campes and Tilghman, 1989. Genes Dev. 3: 537-546).

[0488] The invention further provides a recombinant expression vector comprising a DNA molecule of the invention cloned into the expression vector in an antisense orientation. That is, the DNA molecule is operatively-linked to a regulatory sequence in a manner that allows for expression (by transcription of the DNA molecule) of an RNA molecule that is antisense to NOVX mRNA. Regulatory sequences operatively linked to a nucleic acid cloned in the antisense orientation can be chosen that direct the continuous expression of the antisense RNA molecule in a variety of cell types, for instance viral promoters and/or enhancers, or regulatory sequences can be chosen that direct constitutive, tissue specific or cell type specific expression of antisense RNA. The antisense expression vector can be in the form of a recombinant plasmid, phagemid or attenuated virus in which antisense nucleic acids are produced under the control of a high efficiency regulatory region, the activity of which can be determined by the cell type into which the vector is introduced. For a discussion of the regulation of gene expression using antisense genes see, e.g., Weintraub, et al., “Antisense RNA as a molecular tool for genetic analysis,” Reviews-Trends in Genetics, Vol. 1(1) 1986.

[0489] Another aspect of the invention pertains to host cells into which a recombinant expression vector of the invention has been introduced. The terms “host cell” and “recombinant host cell” are used interchangeably herein. It is understood that such terms refer not only to the particular subject cell but also to the progeny or potential progeny of such a cell. Because certain modifications may occur in succeeding generations due to either mutation or environmental influences, such progeny may not, in fact, be identical to the parent cell, but are still included within the scope of the term as used herein.

[0490] A host cell can be any prokaryotic or eukaryotic cell. For example, NOVX protein can be expressed in bacterial cells such as E. coli, insect cells, yeast or mammalian cells (such as Chinese hamster ovary cells (CHO) or COS cells). Other suitable host cells are known to those skilled in the art.

[0491] Vector DNA can be introduced into prokaryotic or eukaryotic cells via conventional transformation or transfection techniques. As used herein, the terms “transformation” and “transfection” are intended to refer to a variety of art-recognized techniques for introducing foreign nucleic acid (e.g., DNA) into a host cell, including calcium phosphate or calcium chloride co-precipitation, DEAE-dextran-mediated transfection, lipofection, or electroporation. Suitable methods for transforming or transfecting host cells can be found in Sambrook, et al. (MOLECULAR CLONING: A LABORATORY MANUAL. 2nd ed., Cold Spring Harbor Laboratory, Cold Spring Harbor Laboratory Press, Cold Spring Harbor, N.Y., 1989), and other laboratory manuals.

[0492] For stable transfection of mammalian cells, it is known that, depending upon the expression vector and transfection technique used, only a small fraction of cells may integrate the foreign DNA into their genome. In order to identify and select these integrants, a gene that encodes a selectable marker (e.g., resistance to antibiotics) is generally introduced into the host cells along with the gene of interest. Various selectable markers include those that confer resistance to drugs, such as G418, hygromycin and methotrexate. Nucleic acid encoding a selectable marker can be introduced into a host cell on the same vector as that encoding NOVX or can be introduced on a separate vector. Cells stably transfected with the introduced nucleic acid can be identified by drug selection (e.g., cells that have incorporated the selectable marker gene will survive, while the other cells die).

[0493] A host cell of the invention, such as a prokaryotic or eukaryotic host cell in culture, can be used to produce (i.e., express) NOVX protein. Accordingly, the invention further provides methods for producing NOVX protein using the host cells of the invention. In one embodiment, the method comprises culturing the host cell of invention (into which a recombinant expression vector encoding NOVX protein has been introduced) in a suitable medium such that NOVX protein is produced. In another embodiment, the method further comprises isolating NOVX protein from the medium or the host cell.

[0494] Transgenic NOVX Animals

[0495] The host cells of the invention can also be used to produce non-human transgenic animals. For example, in one embodiment, a host cell of the invention is a fertilized oocyte or an embryonic stem cell into which NOVX protein-coding sequences have been introduced. Such host cells can then be used to create non-human transgenic animals in which exogenous NOVX sequences have been introduced into their genome or homologous recombinant animals in which endogenous NOVX sequences have been altered. Such animals are useful for studying the function and/or activity of NOVX protein and for identifying and/or evaluating modulators of NOVX protein activity. As used herein, a “transgenic animal” is a non-human animal, preferably a mammal, more preferably a rodent such as a rat or mouse, in which one or more of the cells of the animal includes a transgene. Other examples of transgenic animals include non-human primates, sheep, dogs, cows, goats, chickens, amphibians, etc. A transgene is exogenous DNA that is integrated into the genome of a cell from which a transgenic animal develops and that remains in the genome of the mature animal, thereby directing the expression of an encoded gene product in one or more cell types or tissues of the transgenic animal. As used herein, a “homologous recombinant animal” is a non-human animal, preferably a mammal, more preferably a mouse, in which an endogenous NOVX gene has been altered by homologous recombination between the endogenous gene and an exogenous DNA molecule introduced into a cell of the animal, e.g., an embryonic cell of the animal, prior to development of the animal.

[0496] A transgenic animal of the invention can be created by introducing NOVX-encoding nucleic acid into the male pronuclei of a fertilized oocyte (e.g., by microinjection, retroviral infection) and allowing the oocyte to develop in a pseudopregnant female foster animal. The human NOVX cDNA sequences SEQ ID NOS: 1, 3, 5, 7, 9, 11, 13, 15, 17, 19, 21, 23, 25, 27, 29, and 31 can be introduced as a transgene into the genome of a non-human animal. Alternatively, a non-human homologue of the human NOVX gene, such as a mouse NOVX gene, can be isolated based on hybridization to the human NOVX cDNA (described further supra) and used as a transgene. Intronic sequences and polyadenylation signals can also be included in the transgene to increase the efficiency of expression of the transgene. A tissue-specific regulatory sequence(s) can be operably-linked to the NOVX transgene to direct expression of NOVX protein to particular cells. Methods for generating transgenic animals via embryo manipulation and microinjection, particularly animals such as mice, have become conventional in the art and are described, for example, in U.S. Pat. Nos. 4,736,866; 4,870,009; and 4,873,191; and Hogan, 1986. In: MANIPULATING THE MOUSE EMBRYO, Cold Spring Harbor Laboratory Press, Cold Spring Harbor, N.Y. Similar methods are used for production of other transgenic animals. A transgenic founder animal can be identified based upon the presence of the NOVX transgene in its genome and/or expression of NOVX mRNA in tissues or cells of the animals. A transgenic founder animal can then be used to breed additional animals carrying the transgene. Moreover, transgenic animals carrying a transgene-encoding NOVX protein can further be bred to other transgenic animals carrying other transgenes.

[0497] To create a homologous recombinant animal, a vector is prepared which contains at least a portion of an NOVX gene into which a deletion, addition or substitution has been introduced to thereby alter, e.g., functionally disrupt, the NOVX gene. The NOVX gene can be a human gene (e.g., the cDNA of SEQ ID NOS: 1, 3, 5, 7, 9, 11, 13, 15, 17, 19, 21, 23, 25, 27, 29, and 31), but more preferably, is a non-human homologue of a human NOVX gene. For example, a mouse homologue of human NOVX gene of SEQ ID NOS: 1, 3, 5, 7, 9, 11, 13, 15, 17, 19, 21, 23, 25, 27, 29, and 31 can be used to construct a homologous recombination vector suitable for altering an endogenous NOVX gene in the mouse genome. In one embodiment, the vector is designed such that, upon homologous recombination, the endogenous NOVX gene is functionally disrupted (i.e., no longer encodes a functional protein; also referred to as a “knock out” vector).

[0498] Alternatively, the vector can be designed such that, upon homologous recombination, the endogenous NOVX gene is mutated or otherwise altered but still encodes functional protein (e.g., the upstream regulatory region can be altered to thereby alter the expression of the endogenous NOVX protein). In the homologous recombination vector, the altered portion of the NOVX gene is flanked at its 5′-and 3′-termini by additional nucleic acid of the NOVX gene to allow for homologous recombination to occur between the exogenous NOVX gene carried by the vector and an endogenous NOVX gene in an embryonic stem cell. The additional flanking NOVX nucleic acid is of sufficient length for successful homologous recombination with the endogenous gene. Typically, several kilobases of flanking DNA (both at the 5′-and 3′-termini) are included in the vector. See, e.g., Thomas, et al., 1987. Cell 51: 503 for a description of homologous recombination vectors. The vector is ten introduced into an embryonic stem cell line (e.g., by electroporation) and cells in which the introduced NOVX gene has homologously-recombined with the endogenous NOVX gene are selected. See, e.g., Li, et al., 1992. Cell 69: 915.

[0499] The selected cells are then injected into a blastocyst of an animal (e.g., a mouse) to form aggregation chimeras. See, e.g., Bradley, 1987. In: TERATOCARCINOMAS AND EMBRYONIC STEM CELLS: A PRACTICAL APPROACH, Robertson, ed. IRL, Oxford, pp. 113-152. A chimeric embryo can then be implanted into a suitable pseudopregnant female foster animal and the embryo brought to term. Progeny harboring the homologously-recombined DNA in their germ cells can be used to breed animals in which all cells of the animal contain the homologously-recombined DNA by germline transmission of the transgene. Methods for constructing homologous recombination vectors and homologous recombinant animals are described further in Bradley, 1991. Curr. Opin. Biotechnol. 2: 823-829; PCT International Publication Nos.: WO 90/11354; WO 91/01140; WO 92/0968; and WO 93/04169.

[0500] In another embodiment, transgenic non-humans animals can be produced that contain selected systems that allow for regulated expression of the transgene. One example of such a system is the cre/oxP recombinase system of bacteriophage P1. For a description of the cre/loxP recombinase system, See, e.g., Lakso, et al., 1992. Proc. Natl. Acad. Sci. USA 89: 6232-6236. Another example of a recombinase system is the FLP recombinase system of Saccharomyces cerevisiae. See, O'Gorman, et al., 1991. Science 251:1351-1355. If a cre/loxP recombinase system is used to regulate expression of the transgene, animals containing transgenes encoding both the Cre recombinase and a selected protein are required. Such animals can be provided through the construction of “double” transgenic animals, e.g., by mating two transgenic animals, one containing a transgene encoding a selected protein and the other containing a transgene encoding a recombinase.

[0501] Clones of the non-human transgenic animals described herein can also be produced according to the methods described in Wilmut, et al., 1997. Nature 385: 810-813. In brief, a cell (e.g., a somatic cell) from the transgenic animal can be isolated and induced to exit the growth cycle and enter G₀ phase. The quiescent cell can then be fused, e.g., through the use of electrical pulses, to an enucleated oocyte from an animal of the same species from which the quiescent cell is isolated. The reconstructed oocyte is then cultured such that it develops to morula or blastocyte and then transferred to pseudopregnant female foster animal. The offspring borne of this female foster animal will be a clone of the animal from which the cell (e.g., the somatic cell) is isolated.

[0502] Pharmaceutical Compositions

[0503] The NOVX nucleic acid molecules, NOVX proteins, and anti-NOVX antibodies (also referred to herein as “active compounds”) of the invention, and derivatives, fragments, analogs and homologs thereof, can be incorporated into pharmaceutical compositions suitable for administration. Such compositions typically comprise the nucleic acid molecule, protein, or antibody and a pharmaceutically acceptable carrier. As used herein, “pharmaceutically acceptable carrier” is intended to include any and all solvents, dispersion media, coatings, antibacterial and antifungal agents, isotonic and absorption delaying agents, and the like, compatible with pharmaceutical administration. Suitable carriers are described in the most recent edition of Remington's Pharmaceutical Sciences, a standard reference text in the field, which is incorporated herein by reference. Preferred examples of such carriers or diluents include, but are not limited to, water, saline, finger's solutions, dextrose solution, and 5% human serum albumin. Liposomes and non-aqueous vehicles such as fixed oils may also be used. The use of such media and agents for pharmaceutically active substances is well known in the art. Except insofar as any conventional media or agent is incompatible with the active compound, use thereof in the compositions is contemplated. Supplementary active compounds can also be incorporated into the compositions.

[0504] A pharmaceutical composition of the invention is formulated to be compatible with its intended route of administration. Examples of routes of administration include parenteral, e.g., intravenous, intradermal, subcutaneous, oral (e.g., inhalation), transdermal (i.e., topical), transmucosal, and rectal administration. Solutions or suspensions used for parenteral, intradermal, or subcutaneous application can include the following components: a sterile diluent such as water for injection, saline solution, fixed oils, polyethylene glycols, glycerine, propylene glycol or other synthetic solvents; antibacterial agents such as benzyl alcohol or methyl parabens; antioxidants such as ascorbic acid or sodium bisulfite; chelating agents such as ethylenediaminetetraacetic acid (EDTA); buffers such as acetates, citrates or phosphates, and agents for the adjustment of tonicity such as sodium chloride or dextrose. The pH can be adjusted with acids or bases, such as hydrochloric acid or sodium hydroxide. The parenteral preparation can be enclosed in ampoules, disposable syringes or multiple dose vials made of glass or plastic.

[0505] Pharmaceutical compositions suitable for injectable use include sterile aqueous solutions (where water soluble) or dispersions and sterile powders for the extemporaneous preparation of sterile injectable solutions or dispersion. For intravenous administration, suitable carriers include physiological saline, bacteriostatic water, Cremophor EL™ (BASF, Parsippany, N.J.) or phosphate buffered saline (PBS). In all cases, the composition must be sterile and should be fluid to the extent that easy syringeability exists. It must be stable under the conditions of manufacture and storage and must be preserved against the contaminating action of microorganisms such as bacteria and fungi. The carrier can be a solvent or dispersion medium containing, for example, water, ethanol, polyol (for example, glycerol, propylene glycol, and liquid polyethylene glycol, and the like), and suitable mixtures thereof. The proper fluidity can be maintained, for example, by the use of a coating such as lecithin, by the maintenance of the required particle size in the case of dispersion and by the use of surfactants. Prevention of the action of microorganisms can be achieved by various antibacterial and antifungal agents, for example, parabens, chlorobutanol, phenol, ascorbic acid, thimerosal, and the like. In many cases, it will be preferable to include isotonic agents, for example, sugars, polyalcohols such as manitol, sorbitol, sodium chloride in the composition. Prolonged absorption of the injectable compositions can be brought about by including in the composition an agent which delays absorption, for example, aluminum monostearate and gelatin.

[0506] Sterile injectable solutions can be prepared by incorporating the active compound (e.g., an NOVX protein or anti-NOVX antibody) in the required amount in an appropriate solvent with one or a combination of ingredients enumerated above, as required, followed by filtered sterilization. Generally, dispersions are prepared by incorporating the active compound into a sterile vehicle that contains a basic dispersion medium and the required other ingredients from those enumerated above. In the case of sterile powders for the preparation of sterile injectable solutions, methods of preparation are vacuum drying and freeze-drying that yields a powder of the active ingredient plus any additional desired ingredient from a previously sterile-filtered solution thereof.

[0507] Oral compositions generally include an inert diluent or an edible carrier. They can be enclosed in gelatin capsules or compressed into tablets. For the purpose of oral therapeutic administration, the active compound can be incorporated with excipients and used in the form of tablets, troches, or capsules. Oral compositions can also be prepared using a fluid carrier for use as a mouthwash, wherein the compound in the fluid carrier is applied orally and swished and expectorated or swallowed. Pharmaceutically compatible binding agents, and/or adjuvant materials can be included as part of the composition. The tablets, pills, capsules, troches and the like can contain any of the following ingredients, or compounds of a similar nature: a binder such as microcrystalline cellulose, gum tragacanth or gelatin; an excipient such as starch or lactose, a disintegrating agent such as alginic acid, Primogel, or corn starch; a lubricant such as magnesium stearate or Sterotes; a glidant such as colloidal silicon dioxide; a sweetening agent such as sucrose or saccharin; or a flavoring agent such as peppermint, methyl salicylate, or orange flavoring.

[0508] For administration by inhalation, the compounds are delivered in the form of an aerosol spray from pressured container or dispenser which contains a suitable propellant, e.g., a gas such as carbon dioxide, or a nebulizer.

[0509] Systemic administration can also be by transmucosal or transdermal means. For transmucosal or transdermal administration, penetrants appropriate to the barrier to be permeated are used in the formulation. Such penetrants are generally known in the art, and include, for example, for transmucosal administration, detergents, bile salts, and fusidic acid derivatives. Transmucosal administration can be accomplished through the use of nasal sprays or suppositories. For transdermal administration, the active compounds are formulated into ointments, salves, gels, or creams as generally known in the art.

[0510] The compounds can also be prepared in the form of suppositories (e.g., with conventional suppository bases such as cocoa butter and other glycerides) or retention enemas for rectal delivery.

[0511] In one embodiment, the active compounds are prepared with carriers that will protect the compound against rapid elimination from the body, such as a controlled release formulation, including implants and microencapsulated delivery systems. Biodegradable, biocompatible polymers can be used, such as ethylene vinyl acetate, polyanhydrides, polyglycolic acid, collagen, polyorthoesters, and polylactic acid. Methods for preparation of such formulations will be apparent to those skilled in the art. The materials can also be obtained commercially from Alza Corporation and Nova Pharmaceuticals, Inc. Liposomal suspensions (including liposomes targeted to infected cells with monoclonal antibodies to viral antigens) can also be used as pharmaceutically acceptable carriers. These can be prepared according to methods known to those skilled in the art, for example, as described in U.S. Pat. No. 4,522,811.

[0512] It is especially advantageous to formulate oral or parenteral compositions in dosage unit form for ease of administration and uniformity of dosage. Dosage unit form as used herein refers to physically discrete units suited as unitary dosages for the subject to be treated; each unit containing a predetermined quantity of active compound calculated to produce the desired therapeutic effect in association with the required pharmaceutical carrier. The specification for the dosage unit forms of the invention are dictated by and directly dependent on the unique characteristics of the active compound and the particular therapeutic effect to be achieved, and the limitations inherent in the art of compounding such an active compound for the treatment of individuals.

[0513] The nucleic acid molecules of the invention can be inserted into vectors and used as gene therapy vectors. Gene therapy vectors can be delivered to a subject by, for example, intravenous injection, local administration (see, e.g., U.S. Pat. No. 5,328,470) or by stereotactic injection (see, e.g., Chen, et al., 1994. Proc. Natl. Acad. Sci. USA 91: 3054-3057). The pharmaceutical preparation of the gene therapy vector can include the gene therapy vector in an acceptable diluent, or can comprise a slow release matrix in which the gene delivery vehicle is imbedded. Alternatively, where the complete gene delivery vector can be produced intact from recombinant cells, e.g., retroviral vectors, the pharmaceutical preparation can include one or more cells that produce the gene delivery system.

[0514] The pharmaceutical compositions can be included in a container, pack, or dispenser together with instructions for administration.

[0515] Screening and Detection Methods

[0516] The isolated nucleic acid molecules of the invention can be used to express NOVX protein (e.g., via a recombinant expression vector in a host cell in gene therapy applications), to detect NOVX mRNA (e.g., in a biological sample) or a genetic lesion in an NOVX gene, and to modulate NOVX activity, as described further, below. In addition, the NOVX proteins can be used to screen drugs or compounds that modulate the NOVX protein activity or expression as well as to treat disorders characterized by insufficient or excessive production of NOVX protein or production of NOVX protein forms that have decreased or aberrant activity compared to NOVX wild-type protein (e.g.; diabetes (regulates insulin release); obesity (binds and transport lipids); metabolic disturbances associated with obesity, the metabolic syndrome X as well as anorexia and wasting disorders associated with chronic diseases and various cancers, and infectious disease(possesses anti-microbial activity) and the various dyslipidemias. In addition, the anti-NOVX antibodies of the invention can be used to detect and isolate NOVX proteins and modulate NOVX activity. In yet a further aspect, the invention can be used in methods to influence appetite, absorption of nutrients and the disposition of metabolic substrates in both a positive and negative fashion.

[0517] The invention further pertains to novel agents identified by the screening assays described herein and uses thereof for treatments as described, supra.

[0518] Screening Assays The invention provides a method (also referred to herein as a “screening assay”) for identifying modulators, i.e., candidate or test compounds or agents (e.g., peptides, peptidomimetics, small molecules or other drugs) that bind to NOVX proteins or have a stimulatory or inhibitory effect on, e.g., NOVX protein expression or NOVX protein activity. The invention also includes compounds identified in the screening assays described herein.

[0519] In one embodiment, the invention provides assays for screening candidate or test compounds which bind to or modulate the activity of the membrane-bound form of an NOVX protein or polypeptide or biologically-active portion thereof. The test compounds of the invention can be obtained using any of the numerous approaches in combinatorial library methods known in the art, including: biological libraries; spatially addressable parallel solid phase or solution phase libraries; synthetic library methods requiring deconvolution; the “one-bead one-compound” library method; and synthetic library methods using affinity chromatography selection. The biological library approach is limited to peptide libraries, while the other four approaches are applicable to peptide, non-peptide oligomer or small molecule libraries of compounds. See, e.g., Lam, 1997. Anticancer Drug Design 12: 145.

[0520] A “small molecule” as used herein, is meant to refer to a composition that has a molecular weight of less than about 5 kD and most preferably less than about 4 kD. Small molecules can be, e.g., nucleic acids, peptides, polypeptides, peptidomimetics, carbohydrates, lipids or other organic or inorganic molecules. Libraries of chemical and/or biological mixtures, such as fungal, bacterial, or algal extracts, are known in the art and can be screened with any of the assays of the invention.

[0521] Examples of methods for the synthesis of molecular libraries can be found in the art, for example in: DeWitt, et al., 1993. Proc. Natl. Acad. Sci. U.S.A. 90: 6909; Erb, et al., 1994. Proc. Natl. Acad. Sci. U.S.A. 91: 11422; Zuckermann, et al., 1994. J. Med. Chem. 37: 2678; Cho, et al., 1993. Science 261: 1303; Carrell, et al., 1994. Angew. Chem. Int. Ed. Engl. 33: 2059; Carell, et al., 1994. Angew. Chem. Int. Ed. Engl. 33: 2061; and Gallop, et al., 1994. J. Med. Chem. 37:1233.

[0522] Libraries of compounds may be presented in solution (e.g., Houghten, 1992. Biotechniques 13: 412-421), or on beads (Lam, 1991. Nature 354: 82-84), on chips (Fodor, 1993. Nature 364: 555-556), bacteria (Ladner, U.S. Pat. No. 5,223,409), spores (Ladner, U.S. Pat. 5,233,409), plasmids (Cull, et al., 1992. Proc. Natl. Acad. Sci. USA 89: 1865-1869) or on phage (Scott and Smith, 1990. Science 249: 386-390; Devlin, 1990. Science 249: 404-406; Cwirla, et al., 1990. Proc. Natl. Acad. Sci. U.S.A. 87: 6378-6382; Felici, 1991. J. Mol. Biol. 222: 301-310; Ladner, U.S. Pat. No. 5,233,409.).

[0523] In one embodiment, an assay is a cell-based assay in which a cell which expresses a membrane-bound form of NOVX protein, or a biologically-active portion thereof, on the cell surface is contacted with a test compound and the ability of the test compound to bind to an NOVX protein determined. The cell, for example, can of mammalian origin or a yeast cell. Determining the ability of the test compound to bind to the NOVX protein can be accomplished, for example, by coupling the test compound with a radioisotope or enzymatic label such that binding of the test compound to the NOVX protein or biologically-active portion thereof can be determined by detecting the labeled compound in a complex. For example, test compounds can be labeled with ¹²⁵I, ³⁵S, ¹⁴C, or ³H, either directly or indirectly, and the radioisotope detected by direct counting of radioemission or by scintillation counting. Alternatively, test compounds can be enzymatically-labeled with, for example, horseradish peroxidase, alkaline phosphatase, or luciferase, and the enzymatic label detected by determination of conversion of an appropriate substrate to product. In one embodiment, the assay comprises contacting a cell which expresses a membrane-bound form of NOVX protein, or a biologically-active portion thereof, on the cell surface with a known compound which binds NOVX to form an assay mixture, contacting the assay mixture with a test compound, and determining the ability of the test compound to interact with an NOVX protein, wherein determining the ability of the test compound to interact with an NOVX protein comprises determining the ability of the test compound to preferentially bind to NOVX protein or a biologically-active portion thereof as compared to the known compound.

[0524] In another embodiment, an assay is a cell-based assay comprising contacting a cell expressing a membrane-bound form of NOVX protein, or a biologically-active portion thereof, on the cell surface with a test compound and determining the ability of the test compound to modulate (e.g., stimulate or inhibit) the activity of the NOVX protein or biologically-active portion thereof. Determining the ability of the test compound to modulate the activity of NOVX or a biologically-active portion thereof can be accomplished, for example, by determining the ability of the NOVX protein to bind to or interact with an NOVX target molecule. As used herein, a “target molecule” is a molecule with which an NOVX protein binds or interacts in nature, for example, a molecule on the surface of a cell which expresses an NOVX interacting protein, a molecule on the surface of a second cell, a molecule in the extracellular milieu, a molecule associated with the internal surface of a cell membrane or a cytoplasmic molecule. An NOVX target molecule can be a non-NOVX molecule or an NOVX protein or polypeptide of the invention. In one embodiment, an NOVX target molecule is a component of a signal transduction pathway that facilitates transduction of an extracellular signal (e.g. a signal generated by binding of a compound to a membrane-bound NOVX molecule) through the cell membrane and into the cell. The target, for example, can be a second intercellular protein that has catalytic activity or a protein that facilitates the association of downstream signaling molecules with NOVX.

[0525] Determining the ability of the NOVX protein to bind to or interact with an NOVX target molecule can be accomplished by one of the methods described above for determining direct binding. In one embodiment, determining the ability of the NOVX protein to bind to or interact with an NOVX target molecule can be accomplished by determining the activity of the target molecule. For example, the activity of the target molecule can be determined by detecting induction of a cellular second messenger of the target (i.e. intracellular Ca²⁺, diacylglycerol, IP₃, etc.), detecting catalytic/enzymatic activity of the target an appropriate substrate, detecting the induction of a reporter gene (comprising an NOVX-responsive regulatory element operatively linked to a nucleic acid encoding a detectable marker, e.g., luciferase), or detecting a cellular response, for example, cell survival, cellular differentiation, or cell proliferation.

[0526] In yet another embodiment, an assay of the invention is a cell-free assay comprising contacting an NOVX protein or biologically-active portion thereof with a test compound and determining the ability of the test compound to bind to the NOVX protein or biologically-active portion thereof. Binding of the test compound to the NOVX protein can be determined either directly or indirectly as described above. In one such embodiment, the assay comprises contacting the NOVX protein or biologically-active portion thereof with a known compound which binds NOVX to form an assay mixture, contacting the assay mixture with a test compound, and determining the ability of the test compound to interact with an NOVX protein, wherein determining the ability of the test compound to interact with an NOVX protein comprises determining the ability of the test compound to preferentially bind to NOVX or biologically-active portion thereof as compared to the known compound.

[0527] In still another embodiment, an assay is a cell-free assay comprising contacting NOVX protein or biologically-active portion thereof with a test compound and determining the ability of the test compound to modulate (e.g. stimulate or inhibit) the activity of the NOVX protein or biologically-active portion thereof. Determining the ability of the test compound to modulate the activity of NOVX can be accomplished, for example, by determining the ability of the NOVX protein to bind to an NOVX target molecule by one of the methods described above for determining direct binding. In an alternative embodiment, determining the ability of the test compound to modulate the activity of NOVX protein can be accomplished by determining the ability of the NOVX protein further modulate an NOVX target molecule. For example, the catalytic/enzymatic activity of the target molecule on an appropriate substrate can be determined as described, supra.

[0528] In yet another embodiment, the cell-free assay comprises contacting the NOVX protein or biologically-active portion thereof with a known compound which binds NOVX protein to form an assay mixture, contacting the assay mixture with a test compound, and determining the ability of the test compound to interact with an NOVX protein, wherein determining the ability of the test compound to interact with an NOVX protein comprises determining the ability of the NOVX protein to preferentially bind to or modulate the activity of an NOVX target molecule.

[0529] The cell-free assays of the invention are amenable to use of both the soluble form or the membrane-bound form of NOVX protein. In the case of cell-free assays comprising the membrane-bound form of NOVX protein, it may be desirable to utilize a solubilizing agent such that the membrane-bound form of NOVX protein is maintained in solution. Examples of such solubilizing agents include non-ionic detergents such as n-octylglucoside, n-dodecylglucoside, n-dodecylmaltoside, octanoyl-N-methylglucamide, decanoyl-N-methylglucamide, Triton® X-100, Triton® X-1 14, Thesit®, Isotridecypoly(ethylene glycol ether)ₙ, N-dodecyl-N,N-dimethyl-3-ammonio-1-propane sulfonate, 3-(3-cholamidopropyl) dimethylamminiol-1-propane sulfonate (CHAPS), or 3-(3-cholamidopropyl)dimethylamminiol-2-hydroxy-1-propane sulfonate (CHAPSO).

[0530] In more than one embodiment of the above assay methods of the invention, it may be desirable to immobilize either NOVX protein or its target molecule to facilitate separation of complexed from uncomplexed forms of one or both of the proteins, as well as to accommodate automation of the assay. Binding of a test compound to NOVX protein, or interaction of NOVX protein with a target molecule in the presence and absence of a candidate compound, can be accomplished in any vessel suitable for containing the reactants. Examples of such vessels include microtiter plates, test tubes, and micro-centrifuge tubes. In one embodiment, a fusion protein can be provided that adds a domain that allows one or both of the proteins to be bound to a matrix. For example, GST-NOVX fusion proteins or GST-target fusion proteins can be adsorbed onto glutathione sepharose beads (Sigma Chemical, St. Louis, Mo.) or glutathione derivatized microtiter plates, that are then combined with the test compound or the test compound and either the non-adsorbed target protein or NOVX protein, and the mixture is incubated under conditions conducive to complex formation (e.g., at physiological conditions for salt and pH). Following incubation, the beads or microtiter plate wells are washed to remove any unbound components, the matrix immobilized in the case of beads, complex determined either directly or indirectly, for example, as described, supra. Alternatively, the complexes can be dissociated from the matrix, and the level of NOVX protein binding or activity determined using standard techniques.

[0531] Other techniques for immobilizing proteins on matrices can also be used in the screening assays of the invention. For example, either the NOVX protein or its target molecule can be immobilized utilizing conjugation of biotin and streptavidin. Biotinylated NOVX protein or target molecules can be prepared from biotin-NHS (N-hydroxy-succinimide) using techniques well-known within the art (e.g., biotinylation kit, Pierce Chemicals, Rockford, Ill.), and immobilized in the wells of streptavidin-coated 96 well plates (Pierce Chemical). Alternatively, antibodies reactive with NOVX protein or target molecules, but which do not interfere with binding of the NOVX protein to its target molecule, can be derivatized to the wells of the plate, and unbound target or NOVX protein trapped in the wells by antibody conjugation. Methods for detecting such complexes, in addition to those described above for the GST-immobilized complexes, include immunodetection of complexes using antibodies reactive with the NOVX protein or target molecule, as well as enzyme-linked assays that rely on detecting an enzymatic activity associated with the NOVX protein or target molecule.

[0532] In another embodiment, modulators of NOVX protein expression are identified in a method wherein a cell is contacted with a candidate compound and the expression of NOVX mRNA or protein in the cell is determined. The level of expression of NOVX mRNA or protein in the presence of the candidate compound is compared to the level of expression of NOVX mRNA or protein in the absence of the candidate compound. The candidate compound can then be identified as a modulator of NOVX mRNA or protein expression based upon this comparison. For example, when expression of NOVX mRNA or protein is greater (i.e., statistically significantly greater) in the presence of the candidate compound than in its absence, the candidate compound is identified as a stimulator of NOVX mRNA or protein expression. Alternatively, when expression of NOVX mRNA or protein is less (statistically significantly less) in the presence of the candidate compound than in its absence, the candidate compound is identified as an inhibitor of NOVX mRNA or protein expression. The level of NOVX mRNA or protein expression in the cells can be determined by methods described herein for detecting NOVX mRNA or protein.

[0533] In yet another aspect of the invention, the NOVX proteins can be used as “bait proteins” in a two-hybrid assay or three hybrid assay (see, e.g., U.S. Pat. No. 5,283,317; Zervos, et al., 1993. Cell 72: 223-232; Madura, et al., 1993. J. Biol. Chem. 268: 12046-12054; Bartel, et al., 1993. Biotechniques 14: 920-924; Iwabuchi, et al., 1993. Oncogene 8: 1693-1696; and Brent WO 94/10300), to identify other proteins that bind to or interact with NOVX (“NOVX-binding proteins” or “NOVX-bp”) and modulate NOVX activity. Such NOVX-binding proteins are also likely to be involved in the propagation of signals by the NOVX proteins as, for example, upstream or downstream elements of the NOVX pathway.

[0534] The two-hybrid system is based on the modular nature of most transcription factors, which consist of separable DNA-binding and activation domains. Briefly, the assay utilizes two different DNA constructs. In one construct, the gene that codes for NOVX is fused to a gene encoding the DNA binding domain of a known transcription factor (e.g., GAL-4). In the other construct, a DNA sequence, from a library of DNA sequences, that encodes an unidentified protein (“prey” or “sample”) is fused to a gene that codes for the activation domain of the known transcription factor. If the “bait” and the “prey” proteins are able to interact, in vivo, forming an NOVX-dependent complex, the DNA-binding and activation domains of the transcription factor are brought into close proximity. This proximity allows transcription of a reporter gene (e.g., LacZ) that is operably linked to a transcriptional regulatory site responsive to the transcription factor. Expression of the reporter gene can be detected and cell colonies containing the functional transcription factor can be isolated and used to obtain the cloned gene that encodes the protein which interacts with NOVX.

[0535] The invention further pertains to novel agents identified by the aforementioned screening assays and uses thereof for treatments as described herein.

[0536] Detection Assays

[0537] Portions or fragments of the cDNA sequences identified herein (and the corresponding complete gene sequences) can be used in numerous ways as polynucleotide reagents. By way of example, and not of limitation, these sequences can be used to: (i) map their respective genes on a chromosome; and, thus, locate gene regions associated with genetic disease; (ii) identify an individual from a minute biological sample (tissue typing); and (iii) aid in forensic identification of a biological sample. Some of these applications are described in the subsections, below.

[0538] Chromosome Mapping

[0539] Once the sequence (or a portion of the sequence) of a gene has been isolated, this sequence can be used to map the location of the gene on a chromosome. This process is called chromosome mapping. Accordingly, portions or fragments of the NOVX sequences, SEQ ID NOS: 1, 3, 5, 7, 9, 11, 13, 15, 17, 19, 21, 23, 25, 27, 29, and 31, or fragments or derivatives thereof, can be used to map the location of the NOVX genes, respectively, on a chromosome. The mapping of the NOVX sequences to chromosomes is an important first step in correlating these sequences with genes associated with disease.

[0540] Briefly, NOVX genes can be mapped to chromosomes by preparing PCR primers (preferably 15-25 bp in length) from the NOVX sequences. Computer analysis of the NOVX, sequences can be used to rapidly select primers that do not span more than one exon in the genomic DNA, thus complicating the amplification process. These primers can then be used for PCR screening of somatic cell hybrids containing individual human chromosomes. Only those hybrids containing the human gene corresponding to the NOVX sequences will yield an amplified fragment.

[0541] Somatic cell hybrids are prepared by fusing somatic cells from different mammals (e.g., human and mouse cells). As hybrids of human and mouse cells grow and divide, they gradually lose human chromosomes in random order, but retain the mouse chromosomes. By using media in which mouse cells cannot grow, because they lack a particular enzyme, but in which human cells can, the one human chromosome that contains the gene encoding the needed enzyme will be retained. By using various media, panels of hybrid cell lines can be established. Each cell line in a panel contains either a single human chromosome or a small number of human chromosomes, and a full set of mouse chromosomes, allowing easy mapping of individual genes to specific human chromosomes. See, e.g., D'Eustachio, et al., 1983. Science 220: 919-924. Somatic cell hybrids containing only fragments of human chromosomes can also be produced by using human chromosomes with translocations and deletions.

[0542] PCR mapping of somatic cell hybrids is a rapid procedure for assigning a particular sequence to a particular chromosome. Three or more sequences can be assigned per day using a single thermal cycler. Using the NOVX sequences to design oligonucleotide primers, sub-localizatiion can be achieved with panels of fragments from specific chromosomes.

[0543] Fluorescence in situ hybridization (FISH) of a DNA sequence to a metaphase chromosomal spread can further be used to provide a precise chromosomal location in one step. Chromosome spreads can be made using cells whose division has been blocked in metaphase by a chemical like colcemid that disrupts the mitotic spindle. The chromosomes can be treated briefly with trypsin, and then stained with Giemsa. A pattern of light and dark bands develops on each chromosome, so that the chromosomes can be identified individually. The FISH technique can be used with a DNA sequence as short as 500 or 600 bases. However, clones larger than 1,000 bases have a higher likelihood of binding to a unique chromosomal location with sufficient signal intensity for simple detection. Preferably 1,000 bases, and more preferably 2,000 bases, will suffice to get good results at a reasonable amount of time. For a review of this technique, see, Verma, et al., HUMAN CHROMOSOMES: A MANUAL OF BASIC TECHNIQUES (Pergamon Press, New York 1988).

[0544] Reagents for chromosome mapping can be used individually to mark a single chromosome or a single site on that chromosome, or panels of reagents can be used for marking multiple sites and/or multiple chromosomes. Reagents corresponding to noncoding regions of the genes actually are preferred for mapping purposes. Coding sequences are more likely to be conserved within gene families, thus increasing the chance of cross hybridizations during chromosomal mapping.

[0545] Once a sequence has been mapped to a precise chromosomal location, the physical position of the sequence on the chromosome can be correlated with genetic map data. Such data are found, e.g., in McKusick, MENDELIAN INHERITANCE IN MAN, available on-line through Johns Hopkins University Welch Medical Library). The relationship between genes and disease, mapped to the same chromosomal region, can then be identified through linkage analysis (co-inheritance of physically adjacent genes), described in, e.g., Egeland, et al., 1987. Nature, 325: 783-787.

[0546] Moreover, differences in the DNA sequences between individuals affected and unaffected with a disease associated with the NOVX gene, can be determined. If a mutation is observed in some or all of the affected individuals but not in any unaffected individuals, then the mutation is likely to be the causative agent of the particular disease. Comparison of affected and unaffected individuals generally involves first looking for structural alterations in the chromosomes, such as deletions or translocations that are visible from chromosome spreads or detectable using PCR based on that DNA sequence. Ultimately, complete sequencing of genes from several individuals can be performed to confirm the presence of a mutation and to distinguish mutations from polymorphisms.

[0547] Tissue Typing

[0548] The NOVX sequences of the invention can also be used to identify individuals from minute biological samples. In this technique, an individual's genomic DNA is digested with one or more restriction enzymes, and probed on a Southern blot to yield unique bands for identification. The sequences of the invention are useful as additional DNA markers for RFLP (“restriction fragment length polymorphisms,” described in U.S. Pat. No. 5,272,057).

[0549] Furthermore, the sequences of the invention can be used to provide an alternative technique that determines the actual base-by-base DNA sequence of selected portions of an individual's genome. Thus, the NOVX sequences described herein can be used to prepare two PCR primers from the 5′-and 3′-termini of the sequences. These primers can then be used to amplify an individual's DNA and subsequently sequence it.

[0550] Panels of corresponding DNA sequences from individuals, prepared in this manner, can provide unique individual identifications, as each individual will have a unique set of such DNA sequences due to allelic differences. The sequences of the invention can be used to obtain such identification sequences from individuals and from tissue. The NOVX sequences of the invention uniquely represent portions of the human genome. Allelic variation occurs to some degree in the coding regions of these sequences, and to a greater degree in the noncoding regions. It is estimated that allelic variation between individual humans occurs with a frequency of about once per each 500 bases. Much of the allelic variation is due to single nucleotide polymorphisms (SNPs), which include restriction fragment length polymorphisms (RFLPs).

[0551] Each of the sequences described herein can, to some degree, be used as a standard against which DNA from an individual can be compared for identification purposes. Because greater numbers of polymorphisms occur in the noncoding regions, fewer sequences are necessary to differentiate individuals. The noncoding sequences can comfortably provide positive individual identification with a panel of perhaps 10 to 1,000 primers that each yield a noncoding amplified sequence of 100 bases. If predicted coding sequences, such as those in SEQ ID NOS: 1, 3, 5, 7, 9, 11, 13, 15, 17, 19, 21, 23, 25, 27, 29, and 31 are used, a more appropriate number of primers for positive individual identification would be 500-2,000.

[0552] Predictive Medicine

[0553] The invention also pertains to the field of predictive medicine in which diagnostic assays, prognostic assays, pharmacogenomics, and monitoring clinical trials are used for prognostic (predictive) purposes to thereby treat an individual prophylactically. Accordingly, one aspect of the invention relates to diagnostic assays for determining NOVX protein and/or nucleic acid expression as well as NOVX activity, in the context of a biological sample (e.g., blood, serum, cells, tissue) to thereby determine whether an individual is afflicted with a disease or disorder, or is at risk of developing a disorder, associated with aberrant NOVX expression or activity. The disorders include metabolic disorders, diabetes, obesity, infectious disease, anorexia, cancer-associated cachexia, cancer, neurodegenerative disorders, Alzheimer's Disease, Parkinson's Disorder, immune disorders, and hematopoietic disorders, and the various dyslipidemias, metabolic disturbances associated with obesity, the metabolic syndrome X and wasting disorders associated with chronic diseases and various cancers. The invention also provides for prognostic (or predictive) assays for determining whether an individual is at risk of developing a disorder associated with NOVX protein, nucleic acid expression or activity. For example, mutations in an NOVX gene can be assayed in a biological sample. Such assays can be used for prognostic or predictive purpose to thereby prophylactically treat an individual prior to the onset of a disorder characterized by or associated with NOVX protein, nucleic acid expression, or biological activity.

[0554] Another aspect of the invention provides methods for determining NOVX protein, nucleic acid expression or activity in an individual to thereby select appropriate therapeutic or prophylactic agents for that individual (referred to herein as “pharmacogenomics”). Pharmacogenomics allows for the selection of agents (e.g., drugs) for therapeutic or prophylactic treatment of an individual based on the genotype of the individual (e.g., the genotype of the individual examined to determine the ability of the individual to respond to a particular agent.)

[0555] Yet another aspect of the invention pertains to monitoring the influence of agents (e.g., drugs, compounds) on the expression or activity of NOVX in clinical trials.

[0556] These and other agents are described in further detail in the following sections.

[0557] Diagnostic Assays

[0558] An exemplary method for detecting the presence or absence of NOVX in a biological sample involves obtaining a biological sample from a test subject and contacting the biological sample with a compound or an agent capable of detecting NOVX protein or nucleic acid (e.g., mRNA, genomic DNA) that encodes NOVX protein such that the presence of NOVX is detected in the biological sample. An agent for detecting NOVX mRNA or genomic DNA is a labeled nucleic acid probe capable of hybridizing to NOVX mRNA or genomic DNA. The nucleic acid probe can be, for example, a full-length NOVX nucleic acid, such as the nucleic acid of SEQ ID NOS: 1, 3, 5, 7, 9, 11, 13, 15, 17, 19, 21, 23, 25, 27, 29, and 31, or a portion thereof, such as an oligonucleotide of at least 15, 30, 50, 100, 250 or 500 nucleotides in length and sufficient to specifically hybridize under stringent conditions to NOVX mRNA or genomic DNA. Other suitable probes for use in the diagnostic assays of the invention are described herein.

[0559] An agent for detecting NOVX protein is an antibody capable of binding to NOVX protein, preferably an antibody with a detectable label. Antibodies can be polyclonal, or more preferably, monoclonal. An intact antibody, or a fragment thereof (e.g., Fab or F(ab′)₂) can be used. The term “labeled”, with regard to the probe or antibody, is intended to encompass direct labeling of the probe or antibody by coupling (i.e., physically linking) a detectable substance to the probe or antibody, as well as indirect labeling of the probe or antibody by reactivity with another reagent that is directly labeled. Examples of indirect labeling include detection of a primary antibody using a fluorescently-labeled secondary antibody and end-labeling of a DNA probe with biotin such that it can be detected with fluorescently-labeled streptavidin. The term “biological sample” is intended to include tissues, cells and biological fluids isolated from a subject, as well as tissues, cells and fluids present within a subject. That is, the detection method of the invention can be used to detect NOVX mRNA, protein, or genomic DNA in a biological sample in vitro as well as in vivo. For example, in vitro techniques for detection of NOVX mRNA include Northern hybridizations and in situ hybridizations. In vitro techniques for detection of NOVX protein include enzyme linked immunosorbent assays (ELISAs), Western blots, immunoprecipitations, and immunofluorescence. In vitro techniques for detection of NOVX genomic DNA include Southern hybridizations. Furthermore, in vivo techniques for detection of NOVX protein include introducing into a subject a labeled anti-NOVX antibody. For example, the antibody can be labeled with a radioactive marker whose presence and location in a subject can be detected by standard imaging techniques.

[0560] In one embodiment, the biological sample contains protein molecules from the test subject. Alternatively, the biological sample can contain mRNA molecules from the test subject or genomic DNA molecules from the test subject. A preferred biological sample is a peripheral blood leukocyte sample isolated by conventional means from a subject.

[0561] In another embodiment, the methods further involve obtaining a control biological sample from a control subject, contacting the control sample with a compound or agent capable of detecting NOVX protein, mRNA, or genomic DNA, such that the presence of NOVX protein, mRNA or genomic DNA is detected in the biological sample, and comparing the presence of NOVX protein, mRNA or genomic DNA in the control sample with the presence of NOVX protein, mRNA or genomic DNA in the test sample.

[0562] The invention also encompasses kits for detecting the presence of NOVX in a biological sample. For example, the kit can comprise: a labeled compound or agent capable of detecting NOVX protein or mRNA in a biological sample; means for determining the amount of NOVX in the sample; and means for comparing the amount of NOVX in the sample with a standard. The compound or agent can be packaged in a suitable container. The kit can further comprise instructions for using the kit to detect NOVX protein or nucleic acid.

[0563] Prognostic Assays

[0564] The diagnostic methods described herein can furthermore be utilized to identify subjects having or at risk of developing a disease or disorder associated with aberrant NOVX expression or activity. For example, the assays described herein, such as the preceding diagnostic assays or the following assays, can be utilized to identify a subject having or at risk of developing a disorder associated with NOVX protein, nucleic acid expression or activity. Alternatively, the prognostic assays can be utilized to identify a subject having or at risk for developing a disease or disorder. Thus, the invention provides a method for identifying a disease or disorder associated with aberrant NOVX expression or activity in which a test sample is obtained from a subject and NOVX protein or nucleic acid (e.g., mRNA, genomic DNA) is detected, wherein the presence of NOVX protein or nucleic acid is diagnostic for a subject having or at risk of developing a disease or disorder associated with aberrant NOVX expression or activity. As used herein, a “test sample” refers to a biological sample obtained from a subject of interest. For example, a test sample can be a biological fluid (e.g., serum), cell sample, or tissue.

[0565] Furthermore, the prognostic assays described herein can be used to determine whether a subject can be administered an agent (e.g., an agonist, antagonist, peptidomimetic, protein, peptide, nucleic acid, small molecule, or other drug candidate) to treat a disease or disorder associated with aberrant NOVX expression or activity. For example, such methods can be used to determine whether a subject can be effectively treated with an agent for a disorder. Thus, the invention provides methods for determining whether a subject can be effectively treated with an agent for a disorder associated with aberrant NOVX expression or activity in which a test sample is obtained and NOVX protein or nucleic acid is detected (e.g., wherein the presence of NOVX protein or nucleic acid is diagnostic for a subject that can be administered the agent to treat a disorder associated with aberrant NOVX expression or activity).

[0566] The methods of the invention can also be used to detect genetic lesions in an NOVX gene, thereby determining if a subject with the lesioned gene is at risk for a disorder characterized by aberrant cell proliferation and/or differentiation. In various embodiments, the methods include detecting, in a sample of cells from the subject, the presence or absence of a genetic lesion characterized by at least one of an alteration affecting the integrity of a gene encoding an NOVX-protein, or the misexpression of the NOVX gene. For example, such genetic lesions can be detected by ascertaining the existence of at least one of: (i) a deletion of one or more nucleotides from an NOVX gene; (ii) an addition of one or more nucleotides to an NOVX gene; (iii) a substitution of one or more nucleotides of an NOVX gene, (iv) a chromosomal rearrangement of an NOVX gene; (v) an alteration in the level of a messenger RNA transcript of an NOVX gene, (vi) aberrant modification of an NOVX gene, such as of the methylation pattern of the genomic DNA, (vii) the presence of a non-wild-type splicing pattern of a messenger RNA transcript of an NOVX gene, (viii) a non-wild-type level of an NOVX protein, (ix) allelic loss of an NOVX gene, and (x) inappropriate post-translational modification of an NOVX protein. As described herein, there are a large number of assay techniques known in the art which can be used for detecting lesions in an NOVX gene. A preferred biological sample is a peripheral blood leukocyte sample isolated by conventional means from a subject. However, any biological sample containing nucleated cells may be used, including, for example, buccal mucosal cells.

[0567] In certain embodiments, detection of the lesion involves the use of a probe/primer in a polymerase chain reaction (PCR) (see, e.g., U.S. Pat. Nos. 4,683,195 and 4,683,202), such as anchor PCR or RACE PCR, or, alternatively, in a ligation chain reaction (LCR) (see, e.g., Landegran, et al., 1988. Science 241: 1077-1080; and Nakazawa, et al., 1994. Proc. Natl. Acad. Sci. USA 91: 360-364), the latter of which can be particularly useful for detecting point mutations in the NOVX-gene (see, Abravaya, et al., 1995. Nucl. Acids Res. 23: 675-682). This method can include the steps of collecting a sample of cells from a patient, isolating nucleic acid (e.g., genomic, mRNA or both) from the cells of the sample, contacting the nucleic acid sample with one or more primers that specifically hybridize to an NOVX gene under conditions such that hybridization and amplification of the NOVX gene (if present) occurs, and detecting the presence or absence of an amplification product, or detecting the size of the amplification product and comparing the length to a control sample. It is anticipated that PCR and/or LCR may be desirable to use as a preliminary amplification step in conjunction with any of the techniques used for detecting mutations described herein.

[0568] Alternative amplification methods include: self sustained sequence replication (see, Guatelli, et al., 1990. Proc. Natl. Acad. Sci. USA 87: 1874-1878), transcriptional amplification system (see, Kwoh, et al., 1989. Proc. Natl. Acad. Sci. USA 86: 1173-1177); Qβ Replicase (see, Lizardi, et al, 1988. BioTechnology 6: 1197), or any other nucleic acid amplification method, followed by the detection of the amplified molecules using techniques well known to those of skill in the art. These detection schemes are especially useful for the detection of nucleic acid molecules if such molecules are present in very low numbers.

[0569] In an alternative embodiment, mutations in an NOVX gene from a sample cell can be identified by alterations in restriction enzyme cleavage patterns. For example, sample and control DNA is isolated, amplified (optionally), digested with one or more restriction endonucleases, and fragment length sizes are determined by gel electrophoresis and compared. Differences in fragment length sizes between sample and control DNA indicates mutations in the sample DNA. Moreover, the use of sequence specific ribozymes (see, e.g., U.S. Pat. No. 5,493,531) can be used to score for the presence of specific mutations by development or loss of a ribozyme cleavage site.

[0570] In other embodiments, genetic mutations in NOVX can be identified by hybridizing a sample and control nucleic acids, e.g., DNA or RNA, to high-density arrays containing hundreds or thousands of oligonucleotides probes. See, e.g., Cronin, et al., 1996. Human Mutation 7: 244-255; Kozal, et al., 1996. Nat. Med. 2: 753-759. For example, genetic mutations in NOVX can be identified in two dimensional arrays containing light-generated DNA probes as described in Cronin, et al., supra. Briefly, a first hybridization array of probes can be used to scan through long stretches of DNA in a sample and control to identify base changes between the sequences by making linear arrays of sequential overlapping probes. This step allows the identification of point mutations. This is followed by a second hybridization array that allows the characterization of specific mutations by using smaller, specialized probe arrays complementary to all variants or mutations detected. Each mutation array is composed of parallel probe sets, one complementary to the wild-type gene and the other complementary to the mutant gene.

[0571] In yet another embodiment, any of a variety of sequencing reactions known in the art can be used to directly sequence the NOVX gene and detect mutations by comparing the sequence of the sample NOVX with the corresponding wild-type (control) sequence. Examples of sequencing reactions include those based on techniques developed by Maxim and Gilbert, 1977. Proc. Natl. Acad. Sci. USA 74: 560 or Sanger, 1977. Proc. Natl. Acad. Sci. USA 74: 5463. It is also contemplated that any of a variety of automated sequencing procedures can be utilized when performing the diagnostic assays (see, e.g., Naeve, et al., 1995. Biotechniques 19: 448), including sequencing by mass spectrometry (see, e.g., PCT International Publication No. WO 94/16101; Cohen, et al., 1996. Adv. Chromatography 36: 127-162; and Griffin, et al., 1993. Appl. Biochem. Biotechnol. 38: 147-159).

[0572] Other methods for detecting mutations in the NOVX gene include methods in which protection from cleavage agents is used to detect mismatched bases in RNA/RNA or RNA/DNA heteroduplexes. See, e.g., Myers, et al., 1985. Science 230: 1242. In general, the art technique of “mismatch cleavage” starts by providing heteroduplexes of formed by, hybridizing (labeled) RNA or DNA containing the wild-type NOVX sequence with potentially mutant RNA or DNA obtained from a tissue sample. The double-stranded duplexes are treated with an agent that cleaves single-stranded regions of the duplex such as which will exist due to basepair mismatches between the control and sample strands. For instance, RNA/DNA duplexes can be treated with RNase and DNA/DNA hybrids treated with S₁ nuclease to enzymatically digesting the mismatched regions. In other embodiments, either DNA/DNA or RNA/DNA duplexes can be treated with hydroxylamine or osmium tetroxide and with piperidine in order to digest mismatched regions. After digestion of the mismatched regions, the resulting material is then separated by size on denaturing polyacrylamide gels to determine the site of mutation. See, e.g., Cotton, et al., 1988. Proc. Natl. Acad. Sci. USA 85: 4397; Saleeba, et al., 1992. Methods Enzymol. 217: 286-295. In an embodiment, the control DNA or RNA can be labeled for detection.

[0573] In still another embodiment, the mismatch cleavage reaction employs one or more proteins that recognize mismatched base pairs in double-stranded DNA (so called “DNA mismatch repair” enzymes) in defined systems for detecting and mapping point mutations in NOVX cDNAs obtained from samples of cells. For example, the mutY enzyme of E. coli cleaves A at G/A mismatches and the thymidine DNA glycosylase from HeLa cells cleaves T at G/T mismatches. See, e.g., Hsu, et al., 1994. Carcinogenesis 15: 1657-1662. According to an exemplary embodiment, a probe based on an NOVX sequence, e.g., a wild-type NOVX sequence, is hybridized to a cDNA or other DNA product from a test cell(s). The duplex is treated with a DNA mismatch repair enzyme, and the cleavage products, if any, can be detected from electrophoresis protocols or the like. See, e.g., U.S. Pat. No. 5,459,039.

[0574] In other embodiments, alterations in electrophoretic mobility will be used to identify mutations in NOVX genes. For example, single strand conformation polymorphism (SSCP) may be used to detect differences in electrophoretic mobility between mutant and wild -type nucleic acids. See, e.g., Orita, et al., 1989. Proc. Natl. Acad. Sci. USA: 86: 2766; Cotton, 1993. Mutat. Res. 285: 125-144; Hayashi, 1992. Genet. Anal. Tech. Appl. 9: 73-79. Single-stranded DNA fragments of sample and control NOVX nucleic acids will be denatured and allowed to renature. The secondary structure of single-stranded nucleic acids varies according to sequence, the resulting alteration in electrophoretic mobility enables the detection of even a single base change. The DNA fragments may be labeled or detected with labeled probes. The sensitivity of the assay may be enhanced by using RNA (rather than DNA), in which the secondary structure is more sensitive to a change in sequence. In one embodiment, the subject method utilizes heteroduplex analysis to separate double stranded heteroduplex molecules on the basis of changes in electrophoretic mobility. See, e.g., Keen, et al., 1991. Trends Genet. 7: 5.

[0575] In yet another embodiment, the movement of mutant or wild-type fragments in polyacrylamide gels containing a gradient of denaturant is assayed using denaturing gradient gel electrophoresis (DGGE). See, e.g., Myers, et al., 1985. Nature 313: 495. When DGGE is used as the method of analysis, DNA will be modified to insure that it does not completely denature, for example by adding a GC clamp of approximately 40 bp of high-melting GC-rich DNA by PCR. In a further embodiment, a temperature gradient is used in place of a denaturing gradient to identify differences in the mobility of control and sample DNA. See, e.g., Rosenbaum and Reissner, 1987. Biophys. Chem. 265: 12753.

[0576] Examples of other techniques for detecting point mutations include, but are not limited to, selective oligonucleotide hybridization, selective amplification, or selective primer extension. For example, oligonucleotide primers may be prepared in which the known mutation is placed centrally and then hybridized to target DNA under conditions that permit hybridization only if a perfect match is found. See, e.g., Saiki, et al., 1986. Nature 324: 163; Saiki, et al., 1989. Proc. Natl. Acad. Sci. USA 86: 6230. Such allele specific oligonucleotides are hybridized to PCR amplified target DNA or a number of different mutations when the oligonucleotides are attached to the hybridizing membrane and hybridized with labeled target DNA.

[0577] Alternatively, allele specific amplification technology that depends on selective PCR amplification may be used in conjunction with the instant invention. Oligonucleotides used as primers for specific amplification may carry the mutation of interest in the center of the molecule (so that amplification depends on differential hybridization; see, e.g., Gibbs, et al., 1989. Nucl. Acids Res. 17: 2437-2448) or at the extreme 3′-terminus of one primer where, under appropriate conditions, mismatch can prevent, or reduce polymerase extension (see, e.g., Prossner, 1993. Tibtech. 11: 238). In addition it may be desirable to introduce a novel restriction site in the region of the mutation to create cleavage-based detection. See, e.g., Gasparini, et al., 1992. Mol. Cell Probes 6: 1. It is anticipated that in certain embodiments amplification may also be performed using Taq ligase for amplification. See, e.g., Barany, 1991. Proc. Natl. Acad. Sci. USA 88: 189. In such cases, ligation will occur only if there is a perfect match at the 3′-terminus of the 5′ sequence, making it possible to detect the presence of a known mutation at a specific site by looking for the presence or absence of amplification.

[0578] The methods described herein may be performed, for example, by utilizing pre-packaged diagnostic kits comprising at least one probe nucleic acid or antibody reagent described herein, which may be conveniently used, e.g., in clinical settings to diagnose patients exhibiting symptoms or family history of a disease or illness involving an NOVX gene.

[0579] Furthermore, any cell type or tissue, preferably peripheral blood leukocytes, in which NOVX is expressed may be utilized in the prognostic assays described herein. However, any biological sample containing nucleated cells may be used, including, for example, buccal mucosal cells.

[0580] Pharmacogenomics

[0581] Agents, or modulators that have a stimulatory or inhibitory effect on NOVX activity (e.g., NOVX gene expression), as identified by a screening assay described herein can be administered to individuals to treat (prophylactically or therapeutically) disorders (The disorders include metabolic disorders, diabetes, obesity, infectious disease, anorexia, cancer-associated cachexia, cancer, neurodegenerative disorders, Alzheimer's Disease, Parkinson's Disorder, immune disorders, and hematopoietic disorders, and the various dyslipidemias, metabolic disturbances associated with obesity, the metabolic syndrome X and wasting disorders associated with chronic diseases and various cancers.) In conjunction with such treatment, the pharmacogenomics (i.e., the study of the relationship between an individual's genotype and that individual's response to a foreign compound or drug) of the individual may be considered. Differences in metabolism of therapeutics can lead to severe toxicity or therapeutic failure by altering the relation between dose and blood concentration of the pharmacologically active drug. Thus, the pharmacogenomics of the individual permits the selection of effective agents (e.g., drugs) for prophylactic or therapeutic treatments based on a consideration of the individual's genotype. Such pharmacogenomics can further be used to determine appropriate dosages and therapeutic regimens. Accordingly, the activity of NOVX protein, expression of NOVX nucleic acid, or mutation content of NOVX genes in an individual can be determined to thereby select appropriate agent(s) for therapeutic or prophylactic treatment of the individual.

[0582] Pharmacogenomics deals with clinically significant hereditary variations in the response to drugs due to altered drug disposition and abnormal action in affected persons. See e.g., Eichelbaum, 1996. Clin. Exp. Pharmacol. Physiol., 23: 983-985; Linder, 1997. Clin. Chem., 43: 254-266. In general, two types of pharmacogenetic conditions can be differentiated. Genetic conditions transmitted as a single factor altering the way drugs act on the body (altered drug action) or genetic conditions transmitted as single factors altering the way the body acts on drugs (altered drug metabolism). These pharmacogenetic conditions can occur either as rare defects or as polymorphisms. For example, glucose-6-phosphate dehydrogenase (G6PD) deficiency is a common inherited enzymopathy in which the main clinical complication is hemolysis after ingestion of oxidant drugs (anti-malarials, sulfonamides, analgesics, nitrofurans) and consumption of fava beans.

[0583] As an illustrative embodiment, the activity of drug metabolizing enzymes is a major determinant of both the intensity and duration of drug action. The discovery of genetic polymorphisms of drug metabolizing enzymes (e.g., N-acetyltransferase 2 (NAT 2) and cytochrome P450 enzymes CYP2D6 and CYP2C19) has provided an explanation as to why some patients do not obtain the expected drug effects or show exaggerated drug response and serious toxicity after taking the standard and safe dose of a drug. These polymorphisms are expressed in two phenotypes in the population, the extensive metabolizer (EM) and poor metabolizer (PM). The prevalence of PM is different among different populations. For example, the gene coding for CYP2D6 is highly polymorphic and several mutations have been identified in PM, which all lead to the absence of functional CYP2D6. Poor metabolizers of CYP2D6 and CYP2C19 quite frequently experience exaggerated drug response and side effects when they receive standard doses. If a metabolite is the active therapeutic moiety, PM show no therapeutic response, as demonstrated for the analgesic effect of codeine mediated by its CYP2D6-formed metabolite morphine. At the other extreme are the so called ultra-rapid metabolizers who do not respond to standard doses. Recently, the molecular basis of ultra-rapid metabolism has been identified to be due to CYP2D6 gene amplification.

[0584] Thus, the activity of NOVX protein, expression of NOVX nucleic acid, or mutation content of NOVX genes in an individual can be determined to thereby select appropriate agent(s) for therapeutic or prophylactic treatment of the individual. In addition, pharmacogenetic studies can be used to apply genotyping of polymorphic alleles encoding drug-metabolizing enzymes to the identification of an individual's drug responsiveness phenotype. This knowledge, when applied to dosing or drug selection, can avoid adverse reactions or therapeutic failure and thus enhance therapeutic or prophylactic efficiency when treating a subject with an NOVX modulator, such as a modulator identified by one of the exemplary screening assays described herein.

[0585] Monitoring of Effects During Clinical Trials

[0586] Monitoring the influence of agents (e.g., drugs, compounds) on the expression or activity of NOVX (e.g., the ability to modulate aberrant cell proliferation and/or differentiation) can be applied not only in basic drug screening, but also in clinical trials. For example, the effectiveness of an agent determined by a screening assay as described herein to increase NOVX gene expression, protein levels, or upregulate NOVX activity, can be monitored in clinical trails of subjects exhibiting decreased NOVX gene expression, protein levels, or downregulated NOVX activity. Alternatively, the effectiveness of an agent determined by a screening assay to decrease NOVX gene expression, protein levels, or downregulate NOVX activity, can be monitored in clinical trails of subjects exhibiting increased NOVX gene expression, protein levels, or upregulated NOVX activity. In such clinical trials, the expression or activity of NOVX and, preferably, other genes that have been implicated in, for example, a cellular proliferation or immune disorder can be used as a “read out” or markers of the immune responsiveness of a particular cell.

[0587] By way of example, and not of limitation, genes, including NOVX, that are modulated in cells by treatment with an agent (e.g., compound, drug or small molecule) that modulates NOVX activity (e.g., identified in a screening assay as described herein) can be identified. Thus, to study the effect of agents on cellular proliferation disorders, for example, in a clinical trial, cells can be isolated and RNA prepared and analyzed for the levels of expression of NOVX and other genes implicated in the disorder. The levels of gene expression (i.e., a gene expression pattern) can be quantified by Northern blot analysis or RT-PCR, as described herein, or alternatively by measuring the amount of protein produced, by one of the methods as described herein, or by measuring the levels of activity of NOVX or other genes. In this manner, the gene expression pattern can serve as a marker, indicative of the physiological response of the cells to the agent. Accordingly, this response state may be determined before, and at various points during, treatment of the individual with the agent.

[0588] In one embodiment, the invention provides a method for monitoring the effectiveness of treatment of a subject with an agent (e.g., an agonist, antagonist, protein, peptide, peptidomimetic, nucleic acid, small molecule, or other drug candidate identified by the screening assays described herein) comprising the steps of (i) obtaining a pre-administration sample from a subject prior to administration of the agent; (ii) detecting the level of expression of an NOVX protein, mRNA, or genomic DNA in the preadministration sample; (iii) obtaining one or more post-administration samples from the subject; (iv) detecting the level of expression or activity of the NOVX protein, mRNA, or genomic DNA in the post-administration samples; (v) comparing the level of expression or activity of the NOVX protein, mRNA, or genomic DNA in the pre-administration sample with the NOVX protein, mRNA, or genomic DNA in the post administration sample or samples; and (vi) altering the administration of the agent to the subject accordingly. For example, increased administration of the agent may be desirable to increase the expression or activity of NOVX to higher levels than detected, i.e., to increase the effectiveness of the agent. Alternatively, decreased administration of the agent may be desirable to decrease expression or activity of NOVX to lower levels than detected, i.e., to decrease the effectiveness of the agent.

[0589] Methods of Treatment

[0590] The invention provides for both prophylactic and therapeutic methods of treating a subject at risk of (or susceptible to) a disorder or having a disorder associated with aberrant NOVX expression or activity. The disorders include cardiomyopathy, atherosclerosis, hypertension, congenital heart defects, aortic stenosis, atrial septal defect (ASD), atrioventricular (A-V) canal defect, ductus arteriosus, pulmonary stenosis, subaortic stenosis, ventricular septal defect (VSD), valve diseases, tuberous sclerosis, scleroderma, obesity, transplantation, adrenoleukodystrophy, congenital adrenal hyperplasia, prostate cancer, neoplasm; adenocarcinoma, lymphoma, uterus cancer, fertility, hemophilia, hypercoagulation, idiopathic thrombocytopenic purpura, immunodeficiencies, graft versus host disease, AIDS, bronchial asthma, Crohn's disease; multiple sclerosis, treatment of Albright Hereditary Ostoeodystrophy, and other diseases, disorders and conditions of the like.

[0591] These methods of treatment will be discussed more fully, below.

[0592] Disease and Disorders

[0593] Diseases and disorders that are characterized by increased (relative to a subject not suffering from the disease or disorder) levels or biological activity may be treated with Therapeutics that antagonize (i.e., reduce or inhibit) activity. Therapeutics that antagonize activity may be administered in a therapeutic or prophylactic manner. Therapeutics that may be utilized include, but are not limited to: (i) an aforementioned peptide, or analogs, derivatives, fragments or homologs thereof; (ii) antibodies to an aforementioned peptide; (iii) nucleic acids encoding an aforementioned peptide; (iv) administration of antisense nucleic acid and nucleic acids that are “dysfunctional” (i.e., due to a heterologous insertion within the coding sequences of coding sequences to an aforementioned peptide) that are utilized to “knockout” endogenous function of an aforementioned peptide by homologous recombination (see, e.g., Capecchi, 1989. Science 244: 1288-1292); or (v) modulators ( i.e., inhibitors, agonists and antagonists, including additional peptide mimetic of the invention or antibodies specific to a peptide of the invention) that alter the interaction between an aforementioned peptide and its binding partner.

[0594] Diseases and disorders that are characterized by decreased (relative to a subject not suffering from the disease or disorder) levels or biological activity may be treated with Therapeutics that increase (i.e., are agonists to) activity. Therapeutics that upregulate activity may be administered in a therapeutic or prophylactic manner. Therapeutics that may be utilized include, but are not limited to, an aforementioned peptide, or analogs, derivatives, fragments or homologs thereof; or an agonist that increases bioavailability.

[0595] Increased or decreased levels can be readily detected by quantifying peptide and/or RNA, by obtaining a patient tissue sample (e.g., from biopsy tissue) and assaying it in vitro for RNA or peptide levels, structure and/or activity of the expressed peptides (or mRNAs of an aforementioned peptide). Methods that are well-known within the art include, but are not limited to, immunoassays (e.g., by Western blot analysis, immunoprecipitation followed by sodium dodecyl sulfate (SDS) polyacrylamide gel electrophoresis, immunocytochemistry, etc.) and/or hybridization assays to detect expression of mRNAs (e.g., Northern assays, dot blots, in situ hybridization, and the like).

[0596] Prophylactic Methods

[0597] In one aspect, the invention provides a method for preventing, in a subject, a disease or condition associated with an aberrant NOVX expression or activity, by administering to the subject an agent that modulates NOVX expression or at least one NOVX activity. Subjects at risk for a disease that is caused or contributed to by aberrant NOVX expression or activity can be identified by, for example, any or a combination of diagnostic or prognostic assays as described herein. Administration of a prophylactic agent can occur prior to the manifestation of symptoms characteristic of the NOVX aberrancy, such that a disease or disorder is prevented or, alternatively, delayed in its progression. Depending upon the type of NOVX aberrancy, for example, an NOVX agonist or NOVX antagonist agent can be used for treating the subject. The appropriate agent can be determined based on screening assays described herein. The prophylactic methods of the invention are further discussed in the following subsections.

[0598] Therapeutic Methods

[0599] Another aspect of the invention pertains to methods of modulating NOVX expression or activity for therapeutic purposes. The modulatory method of the invention involves contacting a cell with an agent that modulates one or more of the activities of NOVX protein activity associated with the cell. An agent that modulates NOVX protein activity can be an agent as described herein, such as a nucleic acid or a protein, a naturally-occurring cognate ligand of an NOVX protein, a peptide, an NOVX peptidomimetic, or other small molecule. In one embodiment, the agent stimulates one or more NOVX protein activity. Examples of such stimulatory agents include active NOVX protein and a nucleic acid molecule encoding NOVX that has been introduced into the cell. In another embodiment, the agent inhibits one or more NOVX protein activity. Examples of such inhibitory agents include antisense NOVX nucleic acid molecules and anti-NOVX antibodies. These modulatory methods can be performed in vitro (e.g., by culturing the cell with the agent) or, alternatively, in vivo (e.g., by administering the agent to a subject). As such, the invention provides methods of treating an individual afflicted with a disease or disorder characterized by aberrant expression or activity of an NOVX protein or nucleic acid molecule. In one embodiment, the method involves administering an agent (e.g., an agent identified by a screening assay described herein), or combination of agents that modulates (e.g., up-regulates or down-regulates) NOVX expression or activity. In another embodiment, the method involves administering an NOVX protein or nucleic acid molecule as therapy to compensate for reduced or aberrant NOVX expression or activity.

[0600] Stimulation of NOVX activity is desirable in situations in which NOVX is abnormally downregulated and/or in which increased NOVX activity is likely to have a beneficial effect. One example of such a situation is where a subject has a disorder characterized by aberrant cell proliferation and/or differentiation (e.g., cancer or immune associated disorders). Another example of such a situation is where the subject has a gestational disease (e.g., preclampsia).

[0601] Determination of the Biological Effect of the Therapeutic

[0602] In various embodiments of the invention, suitable in vitro or in vivo assays are performed to determine the effect of a specific Therapeutic and whether its administration is indicated for treatment of the affected tissue.

[0603] In various specific embodiments, in vitro assays may be performed with representative cells of the type(s) involved in the patient's disorder, to determine if a given Therapeutic exerts the desired effect upon the cell type(s). Compounds for use in therapy may be tested in suitable animal model systems including, but not limited to rats, mice, chicken, cows, monkeys, rabbits, and the like, prior to testing in human subjects. Similarly, for in vivo testing, any of the animal model system known in the art may be used prior to administration to human subjects.

[0604] Prophylactic and Therapeutic Uses of the Compositions of the Invention

[0605] The NOVX nucleic acids and proteins of the invention are useful in potential prophylactic and therapeutic applications implicated in a variety of disorders including, but not limited to: metabolic disorders, diabetes, obesity, infectious disease, anorexia, cancer-associated cancer, neurodegenerative disorders, Alzheimer's Disease, Parkinson's Disorder, immune disorders, hematopoietic disorders, and the various dyslipidemias, metabolic disturbances associated with obesity, the metabolic syndrome X and wasting disorders associated with chronic diseases and various cancers.

[0606] As an example, a cDNA encoding the NOVX protein of the invention may be useful in gene therapy, and the protein may be useful when administered to a subject in need thereof. By way of non-limiting example, the compositions of the invention will have efficacy for treatment of patients suffering from: metabolic disorders, diabetes, obesity, infectious disease, anorexia, cancer-associated cachexia, cancer, neurodegenerative disorders, Alzheimer's Disease, Parkinson's Disorder, immune disorders, hematopoietic disorders, and the various dyslipidemias.

[0607] Both the novel nucleic acid encoding the NOVX protein, and the NOVX protein of the invention, or fragments thereof, may also be useful in diagnostic applications, wherein the presence or amount of the nucleic acid or the protein are to be assessed. A further use could be as an anti-bacterial molecule (i.e., some peptides have been found to possess anti-bacterial properties). These materials are further useful in the generation of antibodies, which immunospecifically-bind to the novel substances of the invention for use in therapeutic or diagnostic methods.

[0608] The invention will be further described in the following examples, which do not limit the scope of the invention described in the claims.

### EXAMPLES

### Example 1

[0609] Identification of NOVX Clones

[0610] The novel NOVX target sequences identified in the present invention were subjected to the exon linking process to confirm the sequence. PCR primers were designed by starting at the most upstream sequence available, for the forward primer, and at the most downstream sequence available for the reverse primer. Table 13A shows the sequences of the PCR primers used for obtaining different clones. In each case, the sequence was examined, walking inward from the respective termini toward the coding sequence, until a suitable sequence that is either unique or highly selective was encountered, or, in the case of the reverse primer, until the stop codon was reached. Such primers were designed based on in silico predictions for the full length cDNA, part (one or more exons) of the DNA or protein sequence of the target sequence, or by translated homology of the predicted exons to closely related human sequences from other species. These primers were then employed in PCR amplification based on the following pool of human cDNAs: adrenal gland, bone marrow, brain—amygdala, brain—cerebellum, brain—hippocampus, brain—substantia nigra, brain—thalamus, brain—whole, fetal brain, fetal kidney, fetal liver, fetal lung, heart, kidney, lymphoma—Raji, mammary gland, pancreas, pituitary gland, placenta, prostate, salivary gland, skeletal muscle, small intestine, spinal cord, spleen, stomach, testis, thyroid, trachea, uterus. Usually the resulting amplicons were gel purified, cloned and sequenced to high redundancy. The PCR product derived from exon linking was cloned into the pCR2.1 vector from Invitrogen. The resulting bacterial clone has an insert covering the entire open reading frame cloned into the pCR2.1 vector. Table 13B shows a list of these bacterial clones. The resulting sequences from all clones were assembled with themselves, with other fragments in CuraGen Corporation's database and with public ESTs. Fragments and ESTs were included as components for an assembly when the extent of their identity with another component of the assembly was at least 95% over 50 bp. In addition, sequence traces were evaluated manually and edited for corrections if appropriate. These procedures provide the sequence reported herein.

TABLE 13A

PCR Primers for Exon Linking

| NOVX | | SEQ ID | | SEQ ID |
|---|---|---|---|---|
| Clone | Primer 1 (5′-3′) | NO | Primer 2 (5′-3′) | NO |
| NOV1a | AGACTGGGGCCAGGGAGACAG | 119 | CAGAGGCCAAACATCCCCATCAG | 120 |
| NOV1c | GAGACAGCCCTGGGGGAGA | 121 | ACCTGCCTCCTGCCAGTCC | 122 |
| NOV6 | CATGTCCTCGACCGAGAGCGC | 123 | AGGTGGGGGGCTGCTTACTGCTT | 124 |
| NOV9a | GTCATGAAGGGGTTGCTG | 125 | GGTCAGCCCAGCCCCTCTG | 126 |
| NOV10 | CGGCTGCTGGCATGGGTG | 127 | CTCCTGCTCTGTTTCCCCCTTCAT | 128 |
| NOV11a | GCCATGGTGCTGCTGCTGCT | 129 | GGCTCAGTCGGGGTAGATGATAAAGC | 130 |
| NOV11b | CGGGCGCGGCCGTCGGAGT | 131 | CGGGGCCGGCTCAGTCGGGGTAGATGAT | 132 |

[0611] Physical clone: Exons were predicted by homology and the intron/exon boundaries were determined using standard genetic rules. Exons were further selected and refined by means of similarity determination using multiple BLAST (for example, tBlastN, BlastX, and BlastN) searches, and, in some instances, GeneScan and Grail. Expressed sequences from both public and proprietary databases were also added when available to further define and complete the gene sequence. The DNA sequence was then manually corrected for apparent inconsistencies thereby obtaining the sequences encoding the full-length protein.

TABLE 13B

Physical Clones for PCR products

| | |
|---|---|
| NOVX Clone | Clone |

| | | |
|---|---|---|
| NOV1a | Proprietary clones: | 145150175, 145150395, 145150392, 145145203, |
| | | 145150171, 145150168, 137114011 |
| NOV2a | Physical clones: | 107029754, AC078825, AC083812 |
| NOV3 | Physical clones: | 134899552, AC005230 |
| NOV4 | Genomic clnoe: | ba568g11 |
| NOV5 | Genomic clone: | AC008774 |
| NOV6 | Bacterial clone: | 111865::GMAC073364_A.698299.A2 |
| NOV7 | Physical clone: | 106973211, AC015855.4 |
| NOV8 | Physical clone: | 88091010, AL109932.3, AL360269.3, AL356323.6 |
| NOV10 | Proprietary clones: | 140488852, 133419352, 141920635 |
| NOV11a | Genomic clone: | AC026125 |
| NOV12 | Genomic clone: | AC011199 |

### Example 2

[0612] Quantitative Expression Analysis of Clones in Various Tissues and Cells

[0613] The quantitative expression of various clones was assessed using microtiter plates containing RNA samples from a variety of normal and pathology-derived cells, cell lines and tissues using real time quantitative PCR (RTQ PCR). RTQ PCR was performed on an Applied Biosystems ABI PRISM® 7700 or an ABI PRISM® 7900 HT Sequence Detection System. Various collections of samples are assembled on the plates, and referred to as Panel 1 (containing normal tissues and cancer cell lines), Panel 2 (containing samples derived from tissues from normal and cancer sources), Panel 3 (containing cancer cell lines), Panel 4 (containing cells and cell lines from normal tissues and cells related to inflammatory conditions), Panel 5D/5I (containing human tissues and cell lines with an emphasis on metabolic diseases), AI_comprehensive_panel (containing normal tissue and samples from autoinflammatory diseases), Panel CNSD.01 (containing samples from normal and diseased brains) and CNS_neurodegeneration_panel (containing samples from normal and Alzheimer's diseased brains).

[0614] RNA integrity from all samples is controlled for quality by visual assessment of agarose gel electropherograms using 28S and 18S ribosomal RNA staining intensity ratio as a guide (2:1 to 2.5:1 28s: 18s) and the absence of low molecular weight RNAs that would be indicative of degradation products. Samples are controlled against genomic DNA contamination by RTQ PCR reactions run in the absence of reverse transcriptase using probe and primer sets designed to amplify across the span of a single exon.

[0615] First, the RNA samples were normalized to reference nucleic acids such as constitutively expressed genes (for example, β-actin and GAPDH). Normalized RNA (5 ul) was converted to cDNA and analyzed by RTQ-PCR using One Step RT-PCR Master Mix Reagents (Applied Biosystems; Catalog No. 4309169) and gene-specific primers according to the manufacturer's instructions.

[0616] In other cases, non-normalized RNA samples were converted to single strand cDNA (sscDNA) using Superscript II (Invitrogen Corporation; Catalog No. 18064-147) and random hexamers according to the manufacturer's instructions. Reactions containing up to 10 μg of total RNA were performed in a volume of 20 μl and incubated for 60 minutes at 42° C. This reaction can be scaled up to 50 μg of total RNA in a final volume of 100 μl. sscDNA samples are then normalized to reference nucleic acids as described previously, using 1X TaqMan® Universal Master mix (Applied Biosystems; catalog No. 4324020), following the manufacturer's instructions.

[0617] Probes and primers were designed for each assay according to Applied Biosystems Primer Express Software package (version I for Apple Computer's Macintosh Power PC) or a similar algorithm using the target sequence as input. Default settings were used for reaction conditions and the following parameters were set before selecting primers: primer concentration=250 nM, primer melting temperature (Tm) range=58°-60° C., primer optimal Tm=59° C., maximum primer difference=2° C., probe does not have 5′G, probe Tm must be 10° C. greater than primer Tm, amplicon size 75 bp to 100 bp. The probes and primers selected (see below) were synthesized by Synthegen (Houston, Tex., USA). Probes were double purified by HPLC to remove uncoupled dye and evaluated by mass spectroscopy to verify coupling of reporter and quencher dyes to the 5′ and 3′ ends of the probe, respectively. Their final concentrations were: forward and reverse primers, 900 nM each, and probe, 200 nM.

[0618] PCR conditions: When working with RNA samples, normalized RNA from each tissue and each cell line was spotted in each well of either a 96 well or a 384-well PCR plate (Applied Biosystems). PCR cocktails included either a single gene specific probe and primers set, or two multiplexed probe and primers sets (a set specific for the target clone and another gene-specific set multiplexed with the target probe). PCR reactions were set up using TaqMan® One-Step RT-PCR Master Mix (Applied Biosystems, Catalog No. 4313803) following manufacturer's instructions. Reverse transcription was performed at 48° C. for 30 minutes followed by amplification/PCR cycles as follows: 95° C. 10 min, then 40 cycles of 95° C. for 15 seconds, 60° C. for 1 minute. Results were recorded as CT values (cycle at which a given sample crosses a threshold level of fluorescence) using a log scale, with the difference in RNA concentration between a given sample and the sample with the lowest CT value being represented as 2 to the power of delta CT. The percent relative expression is then obtained by taking the reciprocal of this RNA difference and multiplying by 100.

[0619] When working with sscDNA samples, normalized sscDNA was used as described previously for RNA samples. PCR reactions containing one or two sets of probe and primers were set up as described previously, using 1×TaqMan® Universal Master mix (Applied Biosystems; catalog No. 4324020), following the manufacturer's instructions. PCR amplification was performed as follows: 95° C. 10 min, then 40 cycles of 95° C. for 15 seconds, 60° C. for 1 minute. Results were analyzed and processed as described previously.

[0620] Panels 1, 1.1, 1.2, and 1.3D

[0621] The plates for Panels 1, 1.1, 1.2 and 1.3D include 2 control wells (genomic DNA control and chemistry control) and 94 wells containing cDNA from various samples. The samples in these panels are broken into 2 classes: samples derived from cultured cell lines and samples derived from primary normal tissues. The cell lines are derived from cancers of the following types: lung cancer, breast cancer, melanoma, colon cancer, prostate cancer, CNS cancer, squamous cell carcinoma, ovarian cancer, liver cancer, renal cancer, gastric cancer and pancreatic cancer. Cell lines used in these panels are widely available through the American Type Culture Collection (ATCC), a repository for cultured cell lines, and were cultured using the conditions recommended by the ATCC. The normal tissues found on these panels are comprised of samples derived from all major organ systems from single adult individuals or fetuses. These samples are derived from the following organs: adult skeletal muscle, fetal skeletal muscle, adult heart, fetal heart, adult kidney, fetal kidney, adult liver, fetal liver, adult lung, fetal lung, various regions of the brain, the spleen, bone marrow, lymph node, pancreas, salivary gland, pituitary gland, adrenal gland, spinal cord, thymus, stomach, small intestine, colon, bladder, trachea, breast, ovary, uterus, placenta, prostate, testis and adipose.

[0622] In the results for Panels 1, 1.1, 1.2 and 1.3D, the following abbreviations are used:

[0623] ca.=carcinoma,

[0624] *=established from metastasis,

[0625] met=metastasis,

[0626] s cell var=small cell variant,

[0627] non-s=non-sm=non-small,

[0628] squam=squamous,

[0629] pl. eff=pl effusion=pleural effusion,

[0630] glio=glioma,

[0631] astro=astrocytoma, and

[0632] neuro=neuroblastoma.

[0633] General_screening_panel_v1.4

[0634] The plates for Panel 1.4 include 2 control wells (genomic DNA control and chemistry control) and 94 wells containing cDNA from various samples. The samples in Panel 1.4 are broken into 2 classes: samples derived from cultured cell lines and samples derived from primary normal tissues. The cell lines are derived from cancers of the following types: lung cancer, breast cancer, melanoma, colon cancer, prostate cancer, CNS cancer, squamous cell carcinoma, ovarian cancer, liver cancer, renal cancer, gastric cancer and pancreatic cancer. Cell lines used in Panel 1.4 are widely available through the American Type Culture Collection (ATCC), a repository for cultured cell lines, and were cultured using the conditions recommended by the ATCC. The normal tissues found on Panel 1.4 are comprised of pools of samples derived from all major organ systems from 2 to 5 different adult individuals or fetuses. These samples are derived from the following organs: adult skeletal muscle, fetal skeletal muscle, adult heart, fetal heart, adult kidney, fetal kidney, adult liver, fetal liver, adult lung, fetal lung, various regions of the brain, the spleen, bone marrow, lymph node, pancreas, salivary gland, pituitary gland, adrenal gland, spinal cord, thymus, stomach, small intestine, colon, bladder, trachea, breast, ovary, uterus, placenta, prostate, testis and adipose. Abbreviations are as described for Panels 1, 1.1, 1.2, and 1.3D.

[0635] Panels 2D and 2.2

[0636] The plates for Panels 2D and 2.2 generally include 2 control wells and 94 test samples composed of RNA or cDNA isolated from human tissue procured by surgeons working in close cooperation with the National Cancer Institute's Cooperative Human Tissue Network (CHTN) or the National Disease Research Initiative (NDRI). The tissues are derived from human malignancies and in cases where indicated many malignant tissues have “matched margins” obtained from noncancerous tissue just adjacent to the tumor. These are termed normal adjacent tissues and are denoted “NAT” in the results below. The tumor tissue and the “matched margins” are evaluated by two independent pathologists (the surgical pathologists and again by a pathologist at NDRI or CHTN). This analysis provides a gross histopathological assessment of tumor differentiation grade. Moreover, most samples include the original surgical pathology report that provides information regarding the clinical stage of the patient. These matched margins are taken from the tissue surrounding (i.e. immediately proximal) to the zone of surgery (designated “NAT”, for normal adjacent tissue, in Table RR). In addition, RNA and cDNA samples were obtained from various human tissues derived from autopsies performed on elderly people or sudden death victims (accidents, etc.). These tissues were ascertained to be free of disease and were purchased from various commercial sources such as Clontech (Palo Alto, Calif.), Research Genetics, and Invitrogen.

[0637] Panel 3D

[0638] The plates of Panel 3D are comprised of 94 cDNA samples and two control samples. Specifically, 92 of these samples are derived from cultured human cancer cell lines, 2 samples of human primary cerebellar tissue and 2 controls. The human cell lines are generally obtained from ATCC (American Type Culture Collection), NCI or the German tumor cell bank and fall into the following tissue groups: Squamous cell carcinoma of the tongue, breast cancer, prostate cancer, melanoma, epidermoid carcinoma, sarcomas, bladder carcinomas, pancreatic cancers, kidney cancers, leukemias/lymphomas, ovarian/uterine/cervical, gastric, colon, lung and CNS cancer cell lines. In addition, there are two independent samples of cerebellum. These cells are all cultured under standard recommended conditions and RNA extracted using the standard procedures. The cell lines in panel 3D and 1.3D are of the most common cell lines used in the scientific literature.

[0639] Panels 4D, 4R, and 4.1D

[0640] Panel 4 includes samples on a 96 well plate (2 control wells, 94 test samples) composed of RNA (Panel 4R) or cDNA (Panels 4D/4.1D) isolated from various human cell lines or tissues related to inflammatory conditions. Total RNA from control normal tissues such as colon and lung (Stratagene, La Jolla, Calif.) and thymus and kidney (Clontech) was employed. Total RNA from liver tissue from cirrhosis patients and kidney from lupus patients was obtained from BioChain (Biochain Institute, Inc., Hayward, Calif.). Intestinal tissue for RNA preparation from patients diagnosed as having Crohn's disease and ulcerative colitis was obtained from the National Disease Research Interchange (NDRI) (Philadelphia, Pa.).

[0641] Astrocytes, lung fibroblasts, dermal fibroblasts, coronary artery smooth muscle cells, small airway epithelium, bronchial epithelium, microvascular dermal endothelial cells, microvascular lung endothelial cells, human pulmonary aortic endothelial cells, human umbilical vein endothelial cells were all purchased from Clonetics (Walkersville, Md.) and grown in the media supplied for these cell types by Clonetics. These primary cell types were activated with various cytokines or combinations of cytokines for 6 and/or 12-14 hours, as indicated. The following cytokines were used; IL-1 beta at approximately 1-5 ng/ml, TNF alpha at approximately 5-10 ng/ml, IFN gamma at approximately 20-50 ng/ml, IL-4 at approximately 5-10 ng/ml, IL-9 at approximately 5-10 ng/ml, IL-13 at approximately 5-10 ng/ml. Endothelial cells were sometimes starved for various times by culture in the basal media from Clonetics with 0.1% serum.

[0642] Mononuclear cells were prepared from blood of employees at CuraGen Corporation, using Ficoll. LAK cells were prepared from these cells by culture in DMEM 5% FCS (Hyclone), 100 μM non essential amino acids (Gibco/Life Technologies, Rockville, Md.), 1 mM sodium pyruvate (Gibco), mercaptoethanol 5.5×10⁻⁵M (Gibco), and 10 mM Hepes (Gibco) and Interleukin 2 for 4-6 days. Cells were then either activated with 10-20 ng/ml PMA and 1-2 μg/ml ionomycin, IL-12 at 5-10 ng/ml, IFN gamma at 20-50 ng/ml and IL-18 at 5-10 g/ml for 6 hours. In some cases, mononuclear cells were cultured for 4-5 days in DMEM 5% FCS (Hyclone), 100 μM non essential amino acids (Gibco), 1 mM sodium pyruvate (Gibco), mercaptoethanol 5.5×10⁻⁵M (Gibco), and 10 mM Hepes (Gibco) with PHA (phytohemagglutinin) or PWM (pokeweed mitogen) at approximately 5 μg/ml. Samples were taken at 24, 48 and 72 hours for RNA preparation. MLR (mixed lymphocyte reaction) samples were obtained by taking blood from two donors, isolating the mononuclear cells using Ficoll and mixing the isolated mononuclear cells 1:1 at a final concentration of approximately 2×10⁶cells/ml in DMEM 5% FCS (Hyclone), 100 μM non essential amino acids (Gibco), 1 mM sodium pyruvate (Gibco), mercaptoethanol (5.5×10⁻⁵M) (Gibco), and 10 mM Hepes (Gibco). The MLR was cultured and samples taken at various time points ranging from 1-7 days for RNA preparation.

[0643] Monocytes were isolated from mononuclear cells using CD 14 Miltenyi Beads, +ve VS selection columns and a Vario Magnet according to the manufacturer's instructions. Monocytes were differentiated into dendritic cells by culture in DMEM 5% fetal calf serum (FCS) (Hyclone, Logan, Utah), 100 μM non essential amino acids (Gibco), 1 mM sodium pyruvate (Gibco), mercaptoethanol 5.5×10⁻⁵M (Gibco), and 10 mM Hepes (Gibco), 50 ng/ml GMCSF and 5 ng/ml IL-4 for 5-7 days. Macrophages were prepared by culture of monocytes for 5-7 days in DMEM 5% FCS (Hyclone), 100 μM non essential amino acids (Gibco), 1 mM sodium pyruvate (Gibco), mercaptoethanol 5.5×10⁻⁵M (Gibco), 10 mM Hepes (Gibco) and 10% AB Human Serum or MCSF at approximately 50 ng/ml. Monocytes, macrophages and dendritic cells were stimulated for 6 and 12-14 hours with lipopolysaccharide (LPS) at 100 ng/ml. Dendritic cells were also stimulated with anti-CD40 monoclonal antibody (Pharmingen) at 10 μg/ml for 6 and 12-14 hours.

[0644] CD4 lymphocytes, CD8 lymphocytes and NK cells were also isolated from mononuclear cells using CD4, CD8 and CD56 Miltenyi beads, positive VS selection columns and a Vario Magnet according to the manufacturer's instructions. CD45RA and CD45RO CD4 lymphocytes were isolated by depleting mononuclear cells of CD8, CD56, CD14 and CD19 cells using CD8, CD56, CD14 and CD19 Miltenyi beads and positive selection. CD45RO beads were then used to isolate the CD45RO CD4 lymphocytes with the remaining cells being CD45RA CD4 lymphocytes. CD45RA CD4, CD45RO CD4 and CD8 lymphocytes were placed in DMEM 5% FCS (Hyclone), 100 μM non essential amino acids (Gibco), 1 mM sodium pyruvate (Gibco), mercaptoethanol 5.5×10⁻⁵M (Gibco), and 10 mM Hepes (Gibco) and plated at 10⁶cells/ml onto Falcon 6 well tissue culture plates that had been coated overnight with 0.5 μg/ml anti-CD28 (Pharmingen) and 3 ug/ml anti-CD3 (OKT3, ATCC) in PBS. After 6 and 24 hours, the cells were harvested for RNA preparation. To prepare chronically activated CD8 lymphocytes, we activated the isolated CD8 lymphocytes for 4 days on anti-CD28 and anti-CD3 coated plates and then harvested the cells and expanded them in DMEM 5% FCS (Hyclone), 100 μM non essential amino acids (Gibco), 1 mM sodium pyruvate (Gibco), mercaptoethanol 5.5×10⁻⁵M (Gibco), and 10 mM Hepes (Gibco) and IL-2. The expanded CD8 cells were then activated again with plate bound anti-CD3 and anti-CD28 for 4 days and expanded as before. RNA was isolated 6 and 24 hours after the second activation and after 4 days of the second expansion culture. The isolated NK cells were cultured in DMEM 5% FCS (Hyclone), 100 μM non essential amino acids (Gibco), 1 mM sodium pyruvate (Gibco), mercaptoethanol 5.5×10⁻⁵M (Gibco), and 10 mM Hepes (Gibco) and IL-2 for 4-6 days before RNA was prepared.

[0645] To obtain B cells, tonsils were procured from NDRI. The tonsil was cut up with sterile dissecting scissors and then passed through a sieve. Tonsil cells were then spun down and resupended at 10⁶cells/ml in DMEM 5% FCS (Hyclone), 100 μM non essential amino acids (Gibco), 1 mM sodium pyruvate (Gibco), mercaptoethanol 5.5×10⁻⁵M (Gibco), and 10 mM Hepes (Gibco). To activate the cells, we used PWM at 5 μg/ml or anti-CD40 (Pharmingen) at approximately 10 μg/ml and IL-4 at 5-10 ng/ml. Cells were harvested for RNA preparation at 24,48 and 72 hours.

[0646] To prepare the primary and secondary Th1/Th2 and Tr1 cells, six-well Falcon plates were coated overnight with 10 μg/ml anti-CD28 (Pharmingen) and 2 μg/ml OKT3 (ATCC), and then washed twice with PBS. Umbilical cord blood CD4 lymphocytes (Poietic Systems, German Town, Md.) were cultured at 10⁵-10⁶cells/mi in DMEM 5% FCS (ilyclone), 100 μM non essential amino acids (Gibco), 1 mM sodium pyruvate (Gibco), mercaptoethanol 5.5×10⁻⁵M (Gibco), 10 mM Hepes (Gibco) and IL-2 (4 ng/ml). IL-12 (5 ng/ml) and anti-IL4 (1 μg/ml) were used to direct to Th1, while IL-4 (5 ng/ml) and anti-IFN gamma (1 μg/ml) were used to direct to Th2 and IL-10 at 5 ng/ml was used to direct to Tr1. After 4-5 days, the activated Th1, Th2 and Tr1 lymphocytes were washed once in DMEM and expanded for 4-7 days in DMEM 5% FCS (Hyclone), 100 μM non essential amino acids (Gibco), 1 mM sodium pyruvate (Gibco), mercaptoethanol 5.5×10⁻⁵M (Gibco), 10 mM Hepes (Gibco) and IL-2 (1 ng/ml). Following this, the activated Th1, Th2 and Tr1 lymphocytes were re-stimulated for 5 days with anti-CD28/OKT3 and cytokines as described above, but with the addition of anti-CD95L (1 μg/ml) to prevent apoptosis. After 4-5 days, the Th1, Th2 and Tr1 lymphocytes were washed and then expanded again with IL-2 for 4-7 days. Activated Th1 and Th2 lymphocytes were maintained in this way for a maximum of three cycles. RNA was prepared from primary and secondary Th1, Th2 and Tr1 after 6 and 24 hours following the second and third activations with plate bound anti-CD3 and anti-CD28 mAbs and 4 days into the second and third expansion cultures in Interleukin 2.

[0647] The following leukocyte cells lines were obtained from the ATCC: Ramos, EOL-1, KU-812. EOL cells were further differentiated by culture in 0.1 mM dbcAMP at 5×10⁵ cells/ml for 8 days, changing the media every 3 days and adjusting the cell concentration to 5×10⁵ cells/ml. For the culture of these cells, we used DMEM or RPMI (as recommended by the ATCC), with the addition of 5% FCS (Hyclone), 100 μM non essential amino acids (Gibco), 1 mM sodium pyruvate (Gibco), mercaptoethanol 5.5×10⁻⁵M (Gibco), 10 mM Hepes (Gibco). RNA was either prepared from resting cells or cells activated with PMA at 10 ng/ml and ionomycin at 1 μg/ml for 6 and 14 hours. Keratinocyte line CCD106 and an airway epithelial tumor line NCI-H292 were also obtained from the ATCC. Both were cultured in DMEM 5% FCS (Hyclone), 100 μM non essential amino acids (Gibco), 1 mM sodium pyruvate (Gibco), mercaptoethanol 5.5×10⁻⁵M (Gibco), and 10 mM Hepes (Gibco). CCD1106 cells were activated for 6 and 14 hours with approximately 5 ng/ml TNF alpha and 1 ng/ml IL-1 beta, while NCI-H292 cells were activated for 6 and 14 hours with the following cytokines: 5 ng/ml IL-4, 5 ng/ml IL-9, 5 ng/ml IL-13 and 25 ng/ml IFN gamma.

[0648] For these cell lines and blood cells, RNA was prepared by lysing approximately 10⁷ cells/ml using Trizol (Gibco BRL). Briefly, 1/10 volume of bromochloropropane (Molecular Research Corporation) was added to the RNA sample, vortexed and after 10 minutes at room temperature, the tubes were spun at 14,000 rpm in a Sorvall SS34 rotor. The aqueous phase was removed and placed in a 15 ml Falcon Tube. An equal volume of isopropanol was added and left at −20° C. overnight. The precipitated RNA was spun down at 9,000 rpm for 15 min in a Sorvall SS34 rotor and washed in 70% ethanol. The pellet was redissolved in 300 μl of RNAse-free water and 35 μl buffer (Promega) 5 μl DTT, ⁷ μl RNAsin and ⁸ μl DNAse were added. The tube was incubated at 37° C. for 30 minutes to remove contaminating genomic DNA, extracted once with phenol chloroform and re-precipitated with 1/10 volume of 3M sodium acetate and 2 volumes of 100% ethanol. The RNA was spun down and placed in RNAse free water. RNA was stored at −80° C.

[0649] AI_Comprehensive Panel_v1.0

[0650] The plates for AI_comprehensive panel_v1.0 include two control wells and 89 test samples comprised of cDNA isolated from surgical and postmortem human tissues obtained, from the Backus Hospital and Clinomics (Frederick, Md.). Total RNA was extracted from tissue samples from the Backus Hospital in the Facility at CuraGen. Total RNA from other tissues was obtained from Clinomics.

[0651] Joint tissues including synovial fluid, synovium, bone and cartilage were obtained from patients undergoing total knee or hip replacement surgery at the Backus Hospital. Tissue samples were immediately snap frozen in liquid nitrogen to ensure that isolated RNA was of optimal quality and not degraded. Additional samples of osteoarthritis and rheumatoid arthritis joint tissues were obtained from Clinomics. Normal control tissues were supplied by Clinomics and were obtained during autopsy of trauma victims.

[0652] Surgical specimens of psoriatic tissues and adjacent matched tissues were provided as total RNA by Clinomics. Two male and two female patients were selected between the ages of 25 and 47. None of the patients were taking prescription drugs at the time samples were isolated.

[0653] Surgical specimens of diseased colon from patients with ulcerative colitis and Crohns disease and adjacent matched tissues were obtained from Clinomics. Bowel tissue from three female and three male Crohn's patients between the ages of 41-69 were used. Two patients were not on prescription medication while the others were taking dexamethasone, phenobarbital, or tylenol. Ulcerative colitis tissue was from three male and four female patients. Four of the patients were taking lebvid and two were on phenobarbital.

[0654] Total RNA from post mortem lung tissue from trauma victims with no disease or with emphysema, asthma or COPD was purchased from Clinomics. Emphysema patients ranged in age from 40-70 and all were smokers, this age range was chosen to focus on patients with cigarette-linked emphysema and to avoid those patients with alpha-1anti-trypsin deficiencies. Asthma patients ranged in age from 36-75, and excluded smokers to prevent those patients that could also have COPD. COPD patients ranged in age from 35-80 and included both smokers and non-smokers. Most patients were taking corticosteroids, and bronchodilators.

[0655] In the labels employed to identify tissues in the AI_comprehensive panel_v1.0 panel, the following abbreviations are used:

[0656] AI=Autoimmunity

[0657] Syn=Synovial

[0658] Normal =No apparent disease

[0659] Rep22 /Rep20=individual patients

[0660] RA=Rheumatoid arthritis

[0661] Backus=From Backus Hospital

[0662] OA=Osteoarthritis

[0663] (SS) (BA) (MF)=Individual patients

[0664] Adj=Adjacent tissue

[0665] Match control=adjacent tissues

[0666] -M=Male

[0667] -F=Female

[0668] COPD=Chronic obstructive pulmonary disease

[0669] Panels 5D and 51

[0670] The plates for Panel 5D and 5I include two control wells and a variety of cDNAs isolated from human tissues and cell lines with an emphasis on metabolic diseases. Metabolic tissues were obtained from patients enrolled in the Gestational Diabetes study. Cells were obtained during different stages in the differentiation of adipocytes from human mesenchymal stem cells. Human pancreatic islets were also obtained.

[0671] In the Gestational Diabetes study subjects are young (18-40 years), otherwise healthy women with and without gestational diabetes undergoing routine (elective) Caesarean section. After delivery of the infant, when the surgical incisions were being repaired/closed, the obstetrician removed a small sample.

[0672] Patient 2: Diabetic Hispanic, overweight, not on insulin

[0673] Patient 7-9: Nondiabetic Caucasian and obese (BMI>30)

[0674] Patient 10: Diabetic Hispanic, overweight, on insulin

[0675] Patient 11: Nondiabetic African American and overweight

[0676] Patient 12: Diabetic Hispanic on insulin

[0677] Adipocyte differentiation was induced in donor progenitor cells obtained from Osirus (a division of Clonetics/BioWhittaker) in triplicate, except for Donor 3U which had only two replicates. Scientists at Clonetics isolated, grew and differentiated human mesenchymal stem cells (HuMSCs) for CuraGen based on the published protocol found in Mark F. Pittenger, et al., Multilineage Potential of Adult Human Mesenchymal Stem Cells Science Apr. 2 1999: 143-147. Clonetics provided Trizol lysates or frozen pellets suitable for mRNA isolation and ds cDNA production. A general description of each donor is as follows:

[0678] Donor 2 and 3 U: Mesenchymal Stem cells, Undifferentiated Adipose

[0679] Donor 2 and 3 AM: Adipose, AdiposeMidway Differentiated

[0680] Donor 2 and 3 AD: Adipose, Adipose Differentiated

[0681] Human cell lines were generally obtained from ATCC (American Type Culture Collection), NCI or the German tumor cell bank and fall into the following tissue groups: kidney proximal convoluted tubule, uterine smooth muscle cells, small intestine, liver HepG2 cancer cells, heart primary stromal cells, and adrenal cortical adenoma cells. These cells are all cultured under standard recommended conditions and RNA extracted using the standard procedures. All samples were processed at CuraGen to produce single stranded cDNA.

[0682] Panel 5I contains all samples previously described with the addition of pancreatic islets from a 58 year old female patient obtained from the Diabetes Research Institute at the University of Miami School of Medicine. Islet tissue was processed to total RNA at an outside source and delivered to CuraGen for addition to panel 5I.

[0683] In the labels employed to identify tissues in the 5D and 5I panels, the following abbreviations are used:

[0684] GO Adipose=Greater Omentum Adipose

[0685] SK=Skeletal Muscle

[0686] UT=Uterus

[0687] PL=Placenta

[0688] AD=Adipose Differentiated

[0689] AM=Adipose Midway Differentiated

[0690] U=Undifferentiated Stem Cells

[0691] Panel CNSD.01

[0692] The plates for Panel CNSD.01 include two control wells and 94 test samples comprised of cDNA isolated from postmortem human brain tissue obtained from the Harvard Brain Tissue Resource Center. Brains are removed from calvaria of donors between 4 and 24 hours after death, sectioned by neuroanatomists, and frozen at −80° C. in liquid nitrogen vapor. All brains are sectioned and examined by neuropathologists to confirm diagnoses with clear associated neuropathology.

[0693] Disease diagnoses are taken from patient records. The panel contains two brains from each of the following diagnoses: Alzheimer's disease, Parkinson's disease, Huntington's disease, Progressive Supernuclear Palsy, Depression, and “Normal controls”. Within each of these brains, the following regions are represented: cingulate gyrus, temporal pole, globus palladus, substantia nigra, Brodman Area 4 (primary motor strip), Brodman Area 7 (parietal cortex), Brodman Area 9 (prefrontal cortex), and Brodman area 17 (occipital cortex). Not all rain regions are represented in all cases; e.g., Huntington's disease is characterized in part by neurodegeneration in the globus palladus, thus this region is impossible to obtain from confirmed Huntington's cases. Likewise Parkinson's disease is characterized by degeneration of the substantia nigra making this region more difficult to obtain. Normal control brains were examined for neuropathology and found to be free of any pathology consistent with neurodegeneration.

[0694] In the labels employed to identify tissues in the CNS panel, the following abbreviations are used:

[0695] PSP=Progressive supranuclear palsy

[0696] Sub Nigra=Substantia nigra

[0697] Glob Palladus=Globus palladus

[0698] Temp Pole=Temporal pole

[0699] Cing Gyr=Cingulate gyrus

[0700] BA 4=Brodman Area 4

[0701] Panel CNS_Neurodegeneration_V1.0

[0702] The plates for Panel CNS_Neurodegeneration_V1.0 include two control wells and 47 test samples comprised of cDNA isolated from postmortem human brain tissue obtained from the Harvard Brain Tissue Resource Center (McLean Hospital) and the Human Brain and Spinal Fluid Resource Center (VA Greater Los Angeles Healthcare System). Brains are removed from calvaria of donors between 4 and 24 hours after death, sectioned by neuroanatomists, and frozen at −80° C. in liquid nitrogen vapor. All brains are sectioned and examined by neuropathologists to confirm diagnoses with clear associated neuropathology.

[0703] Disease diagnoses are taken from patient records. The panel contains six brains from Alzheimer's disease (AD) patients, and eight brains from “Normal controls” who showed no evidence of dementia prior to death. The eight normal control brains are divided into two categories: Controls with no dementia and no Alzheimer's like pathology (Controls) and controls with no dementia but evidence of severe Alzheimer's like pathology, (specifically senile plaque load rated as level 3 on a scale of 0-3; 0=no evidence of plaques, 3=severe AD senile plaque load). Within each of these brains, the following regions are represented: hippocampus, temporal cortex (Brodman Area 21), parietal cortex (Brodman area 7), and occipital cortex (Brodman area 17). These regions were chosen to encompass all levels of neurodegeneration in AD. The hippocampus is a region of early and severe neuronal loss in AD; the temporal cortex is known to show neurodegeneration in AD after the hippocampus; the parietal cortex shows moderate neuronal death in the late stages of the disease; the occipital cortex is spared in AD and therefore acts as a “control” region within AD patients. Not all brain regions are represented in all cases.

[0704] In the labels employed to identify tissues in the CNS_Neurodegeneration_V1.0 panel, the following abbreviations are used:

[0705] AD=Alzheimer's disease brain; patient was demented and showed AD-like pathology upon autopsy

[0706] Control=Control brains; patient not demented, showing no neuropathology

[0707] Control (Path)=Control brains; pateint not demented but showing sever AD-like pathology

[0708] SupTemporal Ctx=Superior Temporal Cortex

[0709] Inf Temporal Ctx=Inferior Temporal Cortex

[0710] NOV1b, NOV1c

[0711] Expression of NOV1b and NOV1c was assessed using the primer-probe sets Ag1848, Ag2263, Ag2422 and Ag1522, described in Tables 14, 15, 16 and 17. Results of the RTQ-PCR runs are shown in Tables 18, 19, 20, 21, 22, 23 and 24.

TABLE 14

Probe Name Ag1848

| | | | | |
|---|---|---|---|---|
| | | | Start | |
| Primers | Sequences | Length | Position | SEQ ID NO: |

| | | | | |
|---|---|---|---|---|
| Forward | 5′-TGACTTCGACACAGACATCACT-3′ | 22 | 1234 | 133 |
| Probe | TET-5′-ACTCATCTGCTGCCCTGACTGGTG-3′- | 24 | 1257 | 134 |
| | TAMRA | | | |
| Reverse | 5′-CCTTGCCGTCTTAAAGTTGAC-3′ | 21 | 1292 | 135 |

[0712] TABLE 15

Probe Name Ag2263

| | | | | |
|---|---|---|---|---|
| | | | Start | |
| Primers | Sequences | Length | Position | SEQ ID NO: |

| | | | | |
|---|---|---|---|---|
| Forward | 5′-TGACTTCGACACAGACATCACT-3′ | 22 | 1234 | 136 |
| Probe | TET-5′-ACTCATCTGCTGCCCTGACTGGTG-3′- | 24 | 1257 | 137 |
| | TAMRA | | | |
| Reverse | 5′-CCTTGCCGTCTTAAAGTTGAC-3′ | 21 | 1292 | 138 |

[0713] TABLE 16

Probe Name Ag2422

| | | | | |
|---|---|---|---|---|
| | | | Start | |
| Primers | Sequences | Length | Position | SEQ ID NO: |

| | | | | |
|---|---|---|---|---|
| Forward | 5′-GGCTCCCTGGACACTCTCT-3′ | 19 | 2522 | 139 |
| Probe | TET-5′-CTGTCACCACCCAGCTGCGACCTTAT-3′- | 26 | 2559 | 140 |
| | TAMRA | | | |
| Reverse | 5′-TGGACAGTGGGATCTTGAAG-3′ | 20 | 2587 | 141 |

[0714] TABLE 17

Probe Name Ag1522

| | | | | |
|---|---|---|---|---|
| | | | Start | |
| Primers | Sequences | Length | Position | SEQ ID NO: |

| | | | | |
|---|---|---|---|---|
| Forward | 5′-TGACTTCGACACAGACATCACT-3′ | 22 | 1234 | 142 |
| Probe | TET-5′-ACTCATCTGCTGCCCTGACTGGTG-3′- | 24 | 1257 | 143 |
| | TAMRA | | | |
| Reverse | 5′-CCTTGCCGTCTTAAAGTTGAC-3′ | 21 | 1292 | 144 |

[0715] TABLE 18
CNS_neurodegeneration_v1.0

| | Rel. | Rel. | Rel. | Rel. | Rel. |
|---|---|---|---|---|---|
| | Exp. (%) | Exp. (%) | Exp. (%) | Exp. (%) | Exp. (%) |
| | Ag1848, | Ag2263, | Ag2263, | Ag2422, | Ag2422, |
| | Run | Run | Run | Run | Run |
| Tissue Name | 207776125 | 219933384 | 224115886 | 206262709 | 230512499 |
| AD 1 Hippo | 28.3 | 39.0 | 19.3 | 21.3 | 16.6 |
| AD 2 Hippo | 37.9 | 45.1 | 23.5 | 38.7 | 40.1 |
| AD 3 Hippo | 12.0 | 20.6 | 13.9 | 14.9 | 13.0 |
| AD 4 Hippo | 17.7 | 27.2 | 9.0 | 13.3 | 16.4 |
| AD 5 Hippo | 45.4 | 60.3 | 8.1 | 57.8 | 59.0 |
| AD 6 Hippo | 66.9 | 96.6 | 70.2 | 95.9 | 66.0 |
| Control 2 Hippo | 43.2 | 81.2 | 67.8 | 46.0 | 48.3 |
| Control 4 Hippo | 34.2 | 36.6 | 38.7 | 30.4 | 27.5 |
| Control (Path) 3 Hippo | 3.9 | 11.0 | 4.6 | 12.7 | 12.1 |
| AD 1 Temporal Ctx | 47.0 | 79.0 | 69.7 | 40.6 | 27.2 |
| AD 2 Temporal Ctx | 49.3 | 61.6 | 70.7 | 39.8 | 50.7 |
| AD 3 Temporal Ctx | 14.5 | 20.7 | 15.3 | 15.7 | 14.5 |
| AD 4 Temporal Ctx | 41.5 | 53.6 | 31.9 | 36.3 | 39.0 |
| AD 5 Inf Temporal Ctx | 77.9 | 95.9 | 72.2 | 88.9 | 100.0 |
| AD 5 Sup Temporal Ctx | 40.9 | 57.4 | 3.7 | 57.0 | 69.3 |
| AD 6 Inf Temporal Ctx | 84.1 | 99.3 | 100.0 | 74.2 | 83.5 |
| AD 6 Sup Temporal Ctx | 58.2 | 64.6 | 81.8 | 71.7 | 61.1 |
| Control 1 Temporal Ctx | 17.9 | 18.0 | 21.5 | 11.3 | 16.5 |
| Control 2 Temporal Ctx | 45.7 | 39.8 | 66.4 | 44.8 | 55.1 |
| Control 3 Temporal Ctx | 14.7 | 21.8 | 22.7 | 15.6 | 13.5 |
| Control 3 Temporal Ctx | 23.2 | 21.5 | 23.8 | 19.1 | 24.1 |
| Control (Path) 1 Temporal | 46.0 | 39.8 | 19.3 | 40.3 | 51.1 |
| Ctx | | | | | |
| Control (Path) 2 Temporal | 24.7 | 40.6 | 23.7 | 21.8 | 24.0 |
| Ctx | | | | | |
| Control (Path) 3 Temporal | 6.0 | 8.2 | 8.0 | 7.7 | 7.3 |
| Ctx | | | | | |
| Control (Path) 4 Temporal | 32.1 | 29.5 | 31.0 | 24.0 | 18.6 |
| Ctx | | | | | |
| AD 1 Occipital Ctx | 24.1 | 48.0 | 5.5 | 26.4 | 13.7 |
| AD 2 Occipital Ctx | 0.0 | 0.0 | 0.0 | 0.0 | 0.0 |
| (Missing) | | | | | |
| AD 3 Occipital Ctx | 19.2 | 25.3 | 20.4 | 18.2 | 18.8 |
| AD 4 Occipital Ctx | 30.1 | 58.2 | 30.6 | 23.3 | 30.8 |
| AD 5 Occipital Ctx | 6.0 | 39.0 | 8.5 | 26.8 | 23.0 |
| AD 5 Occipital Ctx | 43.2 | 51.8 | 53.6 | 50.3 | 47.6 |
| Control 1 Occipital Ctx | 14.6 | 22.2 | 19.1 | 12.8 | 13.4 |
| Control 2 Occipital Ctx | 66.9 | 85.9 | 94.6 | 76.3 | 70.2 |
| Control 3 Occipital Ctx | 17.8 | 37.1 | 8.0 | 17.4 | 13.1 |
| Control 4 Occipital Ctx | 23.3 | 22.2 | 2.7 | 15.7 | 19.1 |
| Control (Path) 1 Occipital | 100.0 | 100.0 | 63.7 | 100.0 | 90.1 |
| Ctx | | | | | |
| Control (Path) 2 Occipital | 18.7 | 20.9 | 11.0 | 12.3 | 11.7 |
| Ctx | | | | | |
| Control (Path) 3 Occipital | 7.9 | 6.1 | 9.4 | 7.1 | 5.8 |
| Ctx | | | | | |
| Control (Path) 4 Occipital | 24.5 | 21.5 | 11.1 | 14.0 | 13.1 |
| Ctx | | | | | |
| Control 1 Parietal Ctx | 23.2 | 26.8 | 7.4 | 22.2 | 17.6 |
| Control 2 Parietal Ctx | 46.0 | 65.1 | 71.2 | 64.6 | 50.0 |
| Control 3 Parietal Ctx | 26.1 | 27.2 | 16.5 | 17.3 | 19.5 |
| Control (Path) 1 Parietal | 51.1 | 66.0 | 80.1 | 54.3 | 55.1 |
| Ctx | | | | | |
| Control (Path) 2 Parietal | 36.3 | 16.5 | 34.2 | 27.9 | 27.9 |
| Ctx | | | | | |
| Control (Path) 3 Parietal | 6.1 | 10.5 | 1.4 | 5.1 | 4.6 |
| Ctx | | | | | |
| Control (Path) 4 Parietal | 46.0 | 52.5 | 10.7 | 36.6 | 12.2 |
| Ctx | | | | | |

[0716] TABLE 19
Panel 1.2

| | Rel. Exp. (%) | | Rel. Exp. (%) |
|---|---|---|---|
| | Ag1522, Run | | Ag1522, Run |
| Tissue Name | 142131145 | Tissue Name | 142131145 |
| Endothelial cells | 1.2 | Renal ca. 786-0 | 0.0 |
| Heart (Fetal) | 17.9 | Renal ca. A498 | 0.3 |
| Pancreas | 0.7 | Renal ca. RXF 393 | 0.2 |
| Pancreatic ca. CAPAN 2 | 4.9 | Renal ca. ACHN | 0.1 |
| Adrenal Gland | 7.9 | Renal ca. UO-31 | 0.5 |
| Thyroid | 0.1 | Renal ca. TK-10 | 0.3 |
| Salivary gland | 2.5 | Liver | 2.4 |
| Pituitary gland | 0.1 | Liver (fetal) | 0.5 |
| Brain (fetal) | 0.2 | Liver ca. (hepatoblast) | 0.3 |
| | | HepG2 | |
| Brain (whole) | 3.2 | Lung | 0.3 |
| Brain (amygdala) | 4.4 | Lung (fetal) | 0.4 |
| Brain (cerebellum) | 9.0 | Lung ca. (small cell) LX-1 | 25.3 |
| Brain (hippocampus) | 18.9 | Lung ca. (small cell) NCI- | 43.8 |
| | | H69 | |
| Brain (thalamus) | 15.7 | Lung ca. (s.cell var.) SHP- | 0.3 |
| | | 77 | |
| Cerebral Cortex | 35.4 | Lung ca. (large cell)NCI- | 54.7 |
| | | H460 | |
| Spinal cord | 1.6 | Lung ca. (non-sm. cell) | 0.3 |
| | | A549 | |
| glio/astro U87-MG | 72.2 | Lung ca. (non-s.cell) NCI- | 2.4 |
| | | H23 | |
| glio/astro U-118-MG | 3.1 | Lung ca. (non-s.cell) HOP- | 1.7 |
| | | 62 | |
| astrocytoma SW1783 | 0.3 | Lung ca. (non-s.cl) NCI- | 9.3 |
| | | H522 | |
| neuro*; met SK-N-AS | 36.3 | Lung ca. (squam.) SW 900 | 1.5 |
| astrocytoma SF-539 | 5.8 | Lung ca. (squam.) NCI- | 22.4 |
| | | H596 | |
| astrocytoma SNB-75 | 1.7 | Mammary gland | 1.4 |
| glioma SNB-19 | 23.8 | Breast ca.* (pl.ef) MCF-7 | 0.8 |
| glioma U251 | 2.9 | Breast ca.* (pl.ef) MDA- | 0.1 |
| | | MB-231 | |
| glioma SF-295 | 100.0 | Breast ca.* (pl.ef) T47D | 18.4 |
| Heart | 31.6 | Breast ca. BT-549 | 0.1 |
| Skeletal Muscle | 3.4 | Breast ca. MDA-N | 0.0 |
| Bone marrow | 0.2 | Ovary | 6.9 |
| Thymus | 0.2 | Ovarian ca. OVCAR-3 | 1.7 |
| Spleen | 2.1 | Ovarian ca. OVCAR-4 | 12.9 |
| Lymph node | 0.5 | Ovarian ca. OVCAR-5 | 5.7 |
| Colorectal | 1.4 | Ovarian ca. OVCAR-8 | 5.3 |
| Stomach | 1.3 | Ovarian ca. IGROV-1 | 0.8 |
| Small intestine | 3.3 | Ovarian ca. (ascites) SK- | 5.4 |
| | | OV-3 | |
| Colon ca. SW480 | 0.8 | Uterus | 0.9 |
| Colon ca.* SW620 (SW480 | 2.2 | Placenta | 0.9 |
| met) | | | |
| Colon ca. HT29 | 0.1 | Prostate | 10.0 |
| Colon ca. HCT-116 | 7.5 | Prostate ca.* (bone met) | 0.1 |
| | | PC-3 | |
| Colon ca. CaCo-2 | 6.3 | Testis | 0.3 |
| CC Well to Mod Diff | 3.0 | Melanoma Hs688(A).T | 21.2 |
| (ODO3866) | | | |
| Colon ca. HCC-2998 | 1.2 | Melanoma* (met) | 28.5 |
| | | Hs688(B).T | |
| Gastric ca. (liver met) NCI- | 24.7 | Melanoma UACC-62 | 2.4 |
| N87 | | | |
| Bladder | 12.8 | Melanoma M14 | 0.1 |
| Trachea | 0.3 | Melanoma LOX IMVI | 0.1 |
| Kidney | 19.2 | Melanoma* (met) SK- | 1.2 |
| | | MEL-5 | |
| Kidney (fetal) | 6.6 | | |

[0717] TABLE 20
Panel 1.3D

| | Rel. Exp. (%) | Rel. Exp. (%) | Rel. Exp. (%) | Rel. Exp. (%) |
|---|---|---|---|---|
| | Ag1522, Run | Ag1848, Run | Ag2263, Run | Ag2422, Run |
| Tissue Name | 159601761 | 160201402 | 166011650 | 159319549 |
| Liver adenocarcinoma | 15.8 | 12.3 | 31.4 | 18.3 |
| Pancreas | 1.7 | 1.4 | 2.8 | 2.9 |
| Pancreatic ca. CAPAN 2 | 6.7 | 4.6 | 21.6 | 5.5 |
| Adrenal gland | 3.9 | 2.0 | 3.5 | 3.0 |
| Thyroid | 1.7 | 1.5 | 0.0 | 2.5 |
| Salivary gland | 0.6 | 0.2 | 2.3 | 0.3 |
| Pituitary gland | 2.1 | 1.4 | 2.9 | 4.3 |
| Brain (fetal) | 1.4 | 1.1 | 3.5 | 1.1 |
| Brain (whole) | 28.7 | 13.5 | 43.2 | 10.4 |
| Brain (amygdala) | 16.8 | 13.0 | 31.2 | 18.6 |
| Brain (cerebellum) | 8.2 | 6.5 | 42.3 | 9.2 |
| Brain (hippocampus) | 60.7 | 47.6 | 16.8 | 51.8 |
| Brain (substantia nigra) | 8.9 | 5.2 | 32.3 | 6.8 |
| Brain (thalamus) | 40.1 | 22.2 | 62.0 | 19.8 |
| Cerebral Cortex | 25.9 | 18.4 | 36.6 | 14.3 |
| Spinal cord | 10.2 | 5.4 | 37.9 | 7.9 |
| glio/astro U87-MG | 43.2 | 34.6 | 100.0 | 48.6 |
| glio/astro U-118-MG | 10.2 | 8.0 | 6.4 | 7.5 |
| astrocytoma SW1783 | 0.9 | 0.8 | 2.8 | 1.1 |
| neuro*; met SK-N-AS | 100.0 | 100.0 | 59.0 | 100.0 |
| astrocytoma SF-539 | 9.7 | 8.3 | 17.7 | 9.0 |
| astrocytoma SNB-75 | 12.9 | 12.1 | 8.4 | 12.1 |
| glioma SNB-19 | 19.5 | 17.6 | 46.3 | 17.2 |
| glioma U251 | 13.4 | 10.6 | 24.5 | 10.9 |
| glioma SF-295 | 66.9 | 62.4 | 64.2 | 62.0 |
| Heart (Fetal) | 15.6 | 12.5 | 20.0 | 18.7 |
| Heart | 2.2 | 1.1 | 3.4 | 3.3 |
| Skeletal muscle (Fetal) | 22.2 | 14.0 | 6.7 | 19.3 |
| Skeletal muscle | 0.3 | 0.2 | 1.4 | 0.7 |
| Bone marrow | 0.7 | 0.3 | 0.4 | 0.8 |
| Thymus | 2.0 | 1.6 | 3.6 | 3.4 |
| Spleen | 7.9 | 5.6 | 4.5 | 5.9 |
| Lymph node | 2.6 | 1.9 | 2.7 | 2.1 |
| Colorectal | 4.7 | 9.2 | 12.8 | 10.3 |
| Stomach | 6.1 | 2.4 | 3.6 | 4.5 |
| Small intestine | 2.9 | 2.9 | 4.5 | 4.9 |
| Colon ca. SW480 | 2.0 | 1.0 | 1.9 | 1.5 |
| Colon ca.* SW620 (SW480 met) | 1.0 | 1.2 | 2.0 | 2.1 |
| Colon ca. HT29 | 0.1 | 0.1 | 0.0 | 0.1 |
| Colon ca. HCT-116 | 4.2 | 2.9 | 4.7 | 5.6 |
| Colon ca. CaCo-2 | 5.3 | 3.9 | 12.5 | 7.2 |
| CC Well to Mod Diff | 14.8 | 17.3 | 19.8 | 23.5 |
| (ODO3866) | | | | |
| Colon ca. HCC-2998 | 0.7 | 1.6 | 0.0 | 0.5 |
| Gastric ca. (liver met) NCI-N87 | 21.9 | 22.8 | 19.1 | 25.7 |
| Bladder | 2.1 | 1.7 | 3.4 | 1.5 |
| Trachea | 12.2 | 6.8 | 1.6 | 13.8 |
| Kidney | 1.4 | 0.6 | 3.9 | 3.0 |
| Kidney (fetal) | 5.3 | 5.8 | 5.2 | 6.3 |
| Renal ca. 786-0 | 0.1 | 0.0 | 0.0 | 0.0 |
| Renal ca. A498 | 7.7 | 7.9 | 6.8 | 9.7 |
| Renal ca. RXF 393 | 0.1 | 3.6 | 0.8 | 0.1 |
| Renal ca. ACHN | 0.0 | 0.0 | 0.0 | 0.0 |
| Renal ca. UO-31 | 0.2 | 0.3 | 0.5 | 0.3 |
| Renal ca. TK-10 | 0.1 | 0.0 | 0.0 | 0.0 |
| Liver | 0.3 | 0.1 | 0.0 | 0.6 |
| Liver (fetal) | 1.1 | 1.0 | 0.3 | 1.2 |
| Liver ca. (hepatoblast) HepG2 | 0.2 | 0.0 | 0.8 | 0.3 |
| Lung | 8.2 | 9.4 | 4.1 | 10.3 |
| Lung (fetal) | 4.3 | 4.2 | 7.3 | 4.5 |
| Lung ca. (small cell) LX-1 | 8.4 | 6.9 | 31.6 | 9.9 |
| Lung ca. (small cell) NCI-H69 | 44.4 | 48.6 | 90.8 | 54.3 |
| Lung ca. (s.cell var.) SHP-77 | 0.7 | 0.8 | 0.5 | 1.1 |
| Lung ca. (large cell)NCI-H460 | 16.2 | 11.9 | 22.4 | 12.1 |
| Lung ca. (non-sm. cell) A549 | 0.4 | 0.3 | 0.2 | 0.4 |
| Lung ca. (non-s.cell) NCI-H23 | 2.0 | 0.9 | 3.3 | 1.2 |
| Lung ca. (non-s.cell) HOP-62 | 0.4 | 0.9 | 1.6 | 0.7 |
| Lung ca. (non-s.cl) NCI-H522 | 1.7 | 0.8 | 1.7 | 1.1 |
| Lung ca. (squam.) SW 900 | 0.5 | 0.3 | 1.9 | 0.2 |
| Lung ca. (squam.) NCI-H596 | 4.0 | 4.1 | 26.4 | 2.4 |
| Mammary gland | 6.3 | 4.4 | 3.0 | 2.8 |
| Breast ca.* (pl.ef) MCF-7 | 1.1 | 0.4 | 1.5 | 0.9 |
| Breast ca.* (pl.ef) MDA-MB- | 0.8 | 1.2 | 0.7 | 1.4 |
| 231 | | | | |
| Breast ca.* (pl. ef) T47D | 9.6 | 5.7 | 14.0 | 4.5 |
| Breast ca. BT-549 | 0.2 | 0.3 | 0.2 | 0.3 |
| Breast ca. MDA-N | 0.0 | 0.0 | 0.0 | 0.0 |
| Ovary | 6.4 | 4.9 | 6.2 | 9.5 |
| Ovarian ca. OVCAR-3 | 1.1 | 0.6 | 1.1 | 0.8 |
| Ovarian ca. OVCAR-4 | 1.0 | 1.4 | 11.4 | 1.5 |
| Ovarian ca. OVCAR-5 | 2.4 | 2.6 | 5.7 | 3.3 |
| Ovarian ca. OVCAR-8 | 3.6 | 1.6 | 2.6 | 5.4 |
| Ovarian ca. IGROV-1 | 0.6 | 0.2 | 0.7 | 0.2 |
| Ovarian ca. (ascites) SK-OV-3 | 2.0 | 2.6 | 2.1 | 1.1 |
| Uterus | 2.7 | 1.3 | 3.9 | 4.2 |
| Placenta | 2.0 | 2.0 | 5.8 | 4.8 |
| Prostate | 4.4 | 2.5 | 3.4 | 5.4 |
| Prostate ca.* (bone met) PC-3 | 0.1 | 0.1 | 0.2 | 0.0 |
| Testis | 8.1 | 5.5 | 3.5 | 6.4 |
| Melanoma Hs688(A).T | 31.6 | 25.0 | 59.5 | 27.4 |
| Melanoma* (met) Hs688(B).T | 46.0 | 17.1 | 87.1 | 28.5 |
| Melanoma UACC-62 | 0.1 | 0.2 | 2.0 | 0.5 |
| Melanoma M14 | 0.0 | 0.0 | 0.0 | 0.0 |
| Melanoma LOX IMVI | 0.1 | 0.2 | 0.0 | 0.1 |
| Melanoma* (met) SK-MEL-5 | 0.9 | 0.9 | 1.7 | 0.6 |
| Adipose | 3.6 | 2.3 | 5.1 | 2.9 |

[0718] TABLE 21
Panel 2D

| | Rel. Exp. (%) | Rel. Exp. (%) | Rel. Exp. (%) | Rel. Exp. (%) | Rel. Exp. (%) |
|---|---|---|---|---|---|
| | Ag1522, Run | Ag1522, Run | Ag1848, Run | Ag2263, Run | Ag2422, Run |
| Tissue Name | 145049854 | 145492337 | 160202834 | 165725935 | 159317774 |
| Normal Colon | 20.2 | 46.0 | 35.1 | 59.0 | 36.9 |
| CC Well to Mod | 15.3 | 45.1 | 22.5 | 21.8 | 21.3 |
| Diff (ODO3866) | | | | | |
| CC Margin | 6.1 | 15.2 | 7.4 | 7.7 | 5.5 |
| (ODO3866) | | | | | |
| CC Gr.2 | 7.0 | 8.2 | 5.8 | 5.9 | 13.2 |
| rectosigmoid | | | | | |
| (ODO3868) | | | | | |
| CC Margin | 0.3 | 0.5 | 0.5 | 9.3 | 0.8 |
| (ODO3868) | | | | | |
| CC Mod Diff | 1.2 | 4.0 | 2.5 | 5.6 | 5.8 |
| (ODO3920) | | | | | |
| CC Margin | 3.0 | 4.7 | 4.1 | 5.4 | 7.2 |
| (ODO3920) | | | | | |
| CC Gr.2 ascend | 10.7 | 22.5 | 24.1 | 19.9 | 25.5 |
| colon | | | | | |
| (ODO3921) | | | | | |
| CC Margin | 3.6 | 4.3 | 7.3 | 5.6 | 5.8 |
| (ODO3921) | | | | | |
| CC from Partial | 12.1 | 19.9 | 20.7 | 19.3 | 27.0 |
| Hepatectomy | | | | | |
| (ODO4309) | | | | | |
| Mets | | | | | |
| Liver Margin | 0.4 | 3.6 | 2.4 | 2.6 | 3.3 |
| (ODO4309) | | | | | |
| Colon mets to | 5.8 | 11.9 | 6.1 | 8.5 | 10.7 |
| lung (OD04451- | | | | | |
| 01) | | | | | |
| Lung Margin | 9.3 | 17.7 | 7.7 | 10.0 | 15.4 |
| (OD04451-02) | | | | | |
| Normal Prostate | 10.5 | 51.1 | 7.3 | 21.6 | 7.0 |
| 6546-1 | | | | | |
| Prostate Cancer | 12.2 | 14.9 | 14.9 | 9.0 | 17.4 |
| (OD04410) | | | | | |
| Prostate Margin | 14.6 | 13.8 | 25.3 | 19.2 | 29.7 |
| (OD04410) | | | | | |
| Prostate Cancer | 12.2 | 18.0 | 22.7 | 31.6 | 30.6 |
| (OD04720-01) | | | | | |
| Prostate Margin | 11.8 | 11.8 | 17.7 | 16.7 | 25.0 |
| (OD04720-02) | | | | | |
| Normal Lung | 7.3 | 17.8 | 17.6 | 12.8 | 22.4 |
| Lung Met to | 12.7 | 27.4 | 25.0 | 31.0 | 22.1 |
| Muscle | | | | | |
| (ODO4286) | | | | | |
| Muscle Margin | 7.4 | 8.7 | 6.2 | 7.3 | 9.5 |
| (ODO4286) | | | | | |
| Lung Malignant | 22.7 | 27.4 | 26.1 | 28.3 | 20.4 |
| Cancer | | | | | |
| (OD03126) | | | | | |
| Lung Margin | 12.7 | 21.9 | 21.9 | 13.9 | 31.9 |
| (OD03126) | | | | | |
| Lung Cancer | 17.9 | 41.5 | 41.5 | 30.4 | 48.0 |
| (OD04404) | | | | | |
| Lung Margin | 16.4 | 28.7 | 10.0 | 11.8 | 12.4 |
| (OD04404) | | | | | |
| Lung Cancer | 22.5 | 38.2 | 28.5 | 27.9 | 40.6 |
| (OD04565) | | | | | |
| Lung Margin | 8.1 | 11.7 | 8.5 | 8.6 | 16.3 |
| (OD04565) | | | | | |
| Lung Cancer | 9.8 | 7.1 | 10.9 | 8.8 | 9.6 |
| (OD04237-01) | | | | | |
| Lung Margin | 12.9 | 23.0 | 14.3 | 14.0 | 16.0 |
| (OD04237-02) | | | | | |
| Ocular Mel Met | 0.6 | 0.5 | 0.7 | 0.5 | 1.1 |
| to Liver | | | | | |
| (ODO4310) | | | | | |
| Liver Margin | 3.5 | 2.6 | 1.8 | 3.3 | 3.0 |
| (ODO4310) | | | | | |
| Melanoma | 1.4 | 2.0 | 3.6 | 4.3 | 2.9 |
| Metastasis | | | | | |
| Lung Margin | 20.4 | 14.4 | 25.2 | 24.0 | 18.6 |
| (OD04321) | | | | | |
| Normal Kidney | 20.2 | 19.9 | 18.0 | 17.4 | 26.1 |
| Kidney Ca, | 1.7 | 4.2 | 2.9 | 2.7 | 4.9 |
| Nuclear grade 2 | | | | | |
| (OD04338) | | | | | |
| Kidney Margin | 6.2 | 11.7 | 17.2 | 11.3 | 22.8 |
| (OD04338) | | | | | |
| Kidney Ca | 3.6 | 10.0 | 3.7 | 4.6 | 6.6 |
| Nuclear grade | | | | | |
| 1/2 (OD04339) | | | | | |
| Kidney Margin | 11.7 | 12.2 | 11.4 | 12.1 | 11.0 |
| (OD04339) | | | | | |
| Kidney Ca, Clear | 46.7 | 50.7 | 66.0 | 65.1 | 70.7 |
| cell type | | | | | |
| (OD04340) | | | | | |
| Kidney Margin | 15.3 | 19.1 | 14.8 | 12.9 | 16.8 |
| (OD04340) | | | | | |
| Kidney Ca, | 21.0 | 9.5 | 16.3 | 16.8 | 17.0 |
| Nuclear grade 3 | | | | | |
| (OD04348) | | | | | |
| Kidney Margin | 8.2 | 5.8 | 8.8 | 11.5 | 9.3 |
| (OD04348) | | | | | |
| Kidney Cancer | 24.0 | 25.3 | 27.7 | 24.8 | 41.5 |
| (OD04622-01) | | | | | |
| Kidney Margin | 2.1 | 4.6 | 3.4 | 3.1 | 5.9 |
| (OD04622-03) | | | | | |
| Kidney Cancer | 0.2 | 0.0 | 0.2 | 0.5 | 0.5 |
| (OD04450-01) | | | | | |
| Kidney Margin | 5.9 | 6.3 | 9.3 | 9.9 | 12.9 |
| (OD04450-03) | | | | | |
| Kidney Cancer | 7.3 | 9.1 | 11.9 | 12.8 | 13.4 |
| 8120607 | | | | | |
| Kidney Margin | 12.2 | 6.2 | 7.9 | 5.6 | 8.0 |
| 8120608 | | | | | |
| Kidney Cancer | 3.6 | 8.0 | 5.2 | 8.8 | 10.1 |
| 8120613 | | | | | |
| Kidney Margin | 6.3 | 6.7 | 8.9 | 7.5 | 9.3 |
| 8120614 | | | | | |
| Kidney Cancer | 18.7 | 61.1 | 25.0 | 21.9 | 22.1 |
| 9010320 | | | | | |
| Kidney Margin | 14.0 | 20.3 | 16.4 | 12.9 | 17.9 |
| 9010321 | | | | | |
| Normal Uterus | 4.1 | 5.6 | 3.3 | 8.4 | 6.0 |
| Uterine Cancer | 9.6 | 10.7 | 17.1 | 11.7 | 15.6 |
| 064011 | | | | | |
| Normal Thyroid | 2.6 | 9.2 | 2.6 | 1.5 | 3.6 |
| Thyroid Cancer | 100.0 | 72.7 | 100.0 | 82.9 | 100.0 |
| Thyroid Cancer | 7.6 | 4.5 | 12.5 | 8.0 | 11.7 |
| A302152 | | | | | |
| Thyroid Margin | 3.0 | 2.4 | 2.8 | 3.2 | 6.0 |
| A302153 | | | | | |
| Normal Breast | 10.3 | 5.7 | 9.9 | 12.9 | 7.2 |
| Breast Cancer | 11.7 | 15.9 | 12.8 | 12.9 | 12.8 |
| Breast Cancer | 17.9 | 39.0 | 27.2 | 16.5 | 25.3 |
| (OD04590-01) | | | | | |
| Breast Cancer | 26.1 | 66.0 | 35.4 | 42.0 | 27.9 |
| Mets (OD04590- | | | | | |
| 03) | | | | | |
| Breast Cancer | 4.5 | 5.4 | 6.0 | 5.2 | 3.5 |
| Metastasis | | | | | |
| Breast Cancer | 30.8 | 32.1 | 28.1 | 21.6 | 36.3 |
| Breast Cancer | 20.7 | 46.7 | 19.8 | 16.7 | 14.8 |
| Breast Cancer | 13.1 | 15.9 | 13.9 | 11.0 | 22.1 |
| 9100266 | | | | | |
| Breast Margin | 10.4 | 14.4 | 15.6 | 16.4 | 20.9 |
| 9100265 | | | | | |
| Breast Cancer | 22.2 | 26.8 | 34.2 | 25.5 | 50.0 |
| A209073 | | | | | |
| Breast Margin | 6.7 | 9.7 | 7.1 | 4.3 | 11.3 |
| A2090734 | | | | | |
| Normal Liver | 1.4 | 4.2 | 1.6 | 1.7 | 2.3 |
| Liver Cancer | 1.0 | 2.8 | 1.7 | 1.3 | 1.3 |
| Liver Cancer | 1.4 | 1.1 | 3.3 | 2.3 | 3.2 |
| 1025 | | | | | |
| Liver Cancer | 7.8 | 6.5 | 4.9 | 6.4 | 10.7 |
| 1026 | | | | | |
| Liver Cancer | 5.0 | 9.9 | 4.2 | 3.0 | 5.2 |
| 6004-T | | | | | |
| Liver Tissue | 4.7 | 7.9 | 3.5 | 4.2 | 3.7 |
| 6004-N | | | | | |
| Liver Cancer | 7.9 | 11.5 | 8.2 | 10.3 | 6.7 |
| 6005-T | | | | | |
| Liver Tissue | 2.0 | 3.2 | 2.7 | 1.6 | 2.3 |
| 6005-N | | | | | |
| Normal Bladder | 6.8 | 17.9 | 13.6 | 11.5 | 15.2 |
| Bladder Cancer | 10.7 | 22.8 | 14.5 | 14.2 | 14.2 |
| Bladder Cancer | 18.0 | 29.3 | 22.7 | 17.7 | 23.5 |
| Bladder Cancer | 14.5 | 29.3 | 26.1 | 21.0 | 28.3 |
| (OD04718-01) | | | | | |
| Bladder Normal | 2.9 | 5.0 | 3.1 | 3.2 | 4.2 |
| Adjacent | | | | | |
| (OD04718-03) | | | | | |
| Normal Ovary | 1.4 | 4.7 | 3.6 | 4.6 | 5.4 |
| Ovarian Cancer | 40.9 | 100.0 | 89.5 | 100.0 | 76.3 |
| Ovarian Cancer | 9.7 | 43.2 | 16.7 | 15.6 | 19.5 |
| (OD04768-07) | | | | | |
| Ovary Margin | 6.5 | 7.9 | 10.8 | 6.7 | 8.3 |
| (OD04768-08) | | | | | |
| Normal Stomach | 11.8 | 39.5 | 14.7 | 14.8 | 13.1 |
| Gastric Cancer | 1.4 | 6.0 | 2.9 | 2.8 | 2.9 |
| 9060358 | | | | | |
| Stomach Margin | 6.4 | 19.9 | 7.4 | 10.8 | 8.7 |
| 9060359 | | | | | |
| Gastric Cancer | 11.1 | 58.6 | 21.6 | 21.2 | 32.3 |
| 9060395 | | | | | |
| Stomach Margin | 6.8 | 34.6 | 23.7 | 13.8 | 22.2 |
| 9060394 | | | | | |
| Gastric Cancer | 15.4 | 78.5 | 24.8 | 25.2 | 31.9 |
| 9060397 | | | | | |
| Stomach Margin | 3.9 | 14.5 | 6.1 | 7.5 | 7.9 |
| 9060396 | | | | | |
| Gastric Cancer | 2.5 | 14.8 | 7.0 | 7.3 | 13.0 |
| 064005 | | | | | |

[0719] TABLE 22
Panel 3D

| | Rel. Exp. (%) | | Rel. Exp. (%) |
|---|---|---|---|
| | Ag2263, Run | | Ag2263, Run |
| Tissue Name | 170189128 | Tissue Name | 170189128 |
| Daoy-Medulloblastoma | 19.1 | Ca Ski-Cervical epidermoid | 0.4 |
| | | carcinoma (metastasis) | |
| TE671-Medulloblastoma | 8.4 | ES-2-Ovarian clear cell | 0.0 |
| | | carcinoma | |
| D283 Med- | 39.2 | Ramos-Stimulated with | 0.0 |
| Medulloblastoma | | PMA/ionomycin 6 h | |
| PFSK-1-Primitive | 59.5 | Ramos-Stimulated with | 0.0 |
| Neuroectodermal | | PMA/ionomycin 14 h | |
| XF-498-CNS | 0.9 | MEG-01-Chronic | 3.8 |
| | | myelogenous leukemia | |
| | | (megokaryoblast) | |
| SNB-78-Glioma | 35.4 | Raji-Burkitt's lymphoma | 0.0 |
| SF-268-Glioblastoma | 0.0 | Daudi-Burkitt's lymphoma | 0.0 |
| T98G-Glioblastoma | 1.2 | U266-B-cell plasmacytoma | 0.0 |
| SK-N-SH- | 94.6 | CA46-Burkitt's lymphoma | 0.0 |
| Neuroblastoma | | | |
| (metastasis) | | | |
| SF-295-Glioblastoma | 0.3 | RL-non-Hodgkin's B-cell | 0.0 |
| | | lymphoma | |
| Cerebellum | 37.4 | JM1-pre-B-cell lymphoma | 0.0 |
| Cerebellum | 35.1 | Jurkat-T cell leukemia | 0.5 |
| NCI-H292- | 4.3 | TF-1-Erythroleukemia | 73.2 |
| Mucoepidermoid lung | | | |
| carcinoma | | | |
| DMS-114-Small cell | 6.6 | HUT 78-T-cell lymphoma | 0.0 |
| lung cancer | | | |
| DMS-79-Small cell lung | 100.0 | U937-Histiocytic lymphoma | 0.0 |
| cancer | | | |
| NCI-H146-Small cell | 37.4 | KU-812-Myelogenous | 0.6 |
| lung cancer | | leukemia | |
| NCI-H526-Small cell | 17.2 | 769-P-Clear cell renal | 0.0 |
| lung cancer | | carcinoma | |
| NCI-N417-Small cell | 88.9 | Caki-2-Clear cell renal | 0.0 |
| lung cancer | | carcinoma | |
| NCI-H82-Small cell | 95.3 | SW 839-Clear cell renal | 0.0 |
| lung cancer | | carcinoma | |
| NCI-H157-Squamous | 0.8 | G401-Wilms' tumor | 2.8 |
| cell lung cancer | | | |
| (metastasis) | | | |
| NCI-H1155-Large cell | 55.5 | Hs766T-Pancreatic | 0.6 |
| lung cancer | | carcinoma (LN metastasis) | |
| NCI-H1299-Large cell | 0.0 | CAPAN-1-Pancreatic | 3.1 |
| lung cancer | | adenocarcinoma (liver | |
| | | metastasis) | |
| NCI-H727-Lung | 0.7 | SU86.86-Pancreatic | 0.4 |
| carcinoid | | carcinoma (liver metastasis) | |
| NCI-UMC-11-Lung | 7.9 | BxPC-3-Pancreatic | 22.8 |
| carcinoid | | adenocarcinoma | |
| LX-1-Small cell lung | 1.8 | HPAC-Pancreatic | 35.6 |
| cancer | | adenocarcinoma | |
| Colo-205-Colon cancer | 0.3 | MIA PaCa-2-Pancreatic | 0.6 |
| | | carcinoma | |
| KM12-Colon cancer | 0.1 | CFPAC-1-Pancreatic ductal | 1.1 |
| | | adenocarcinoma | |
| KM20L2-Colon cancer | 0.6 | PANC-1-Pancreatic | 0.3 |
| | | epithelioid ductal carcinoma | |
| NCI-H716-Colon cancer | 70.2 | T24-Bladder carcinma | 0.0 |
| | | (transitional cell) | |
| SW-48-Colon | 0.0 | 5637-Bladder carcinoma | 2.2 |
| adenocarcinoma | | | |
| SW1116-Colon | 16.6 | HT-1197- Bladder carcinoma | 0.4 |
| adenocarcinoma | | | |
| LS 174T-Colon | 4.2 | UM-UC-3-Bladder carcinma | 0.2 |
| adenocarcinoma | | (transitional cell) | |
| SW-948-Colon | 0.4 | A204-Rhabdomyosarcoma | 0.0 |
| adenocarcinoma | | | |
| SW-480-Colon | 0.0 | HT-1080-Fibrosarcoma | 7.9 |
| adenocarcinoma | | | |
| NCI-SNU-5-Gastric | 1.7 | MG-63-Osteosarcoma | 16.3 |
| carcinoma | | | |
| KATO III-Gastric | 17.4 | SK-LMS-1-Leiomyosarcoma | 0.0 |
| carcinoma | | (vulva) | |
| NCI-SNU-16-Gastric | 0.7 | SJRH30-Rhabdomyosarcoma | 3.9 |
| carcinoma | | (met to bone marrow) | |
| NCI-SNU-1-Gastric | 23.0 | A431-Epidermoid carcinoma | 34.9 |
| carcinoma | | | |
| RF-1-Gastric | 0.0 | WM266-4-Melanoma | 0.0 |
| adenocarcinoma | | | |
| RF-48-Gastric | 0.0 | DU 145-Prostate carcinoma | 0.0 |
| adenocarcinoma | | (brain metastasis) | |
| MKN-45-Gastric | 11.5 | MDA-MB-468-Breast | 16.4 |
| carcinoma | | adenocarcinoma | |
| NCI-N87-Gastric | 24.0 | SCC-4-Squamous cell | 0.0 |
| carcinoma | | carcinoma of tongue | |
| OVCAR-5-Ovarian | 3.7 | SCC-9-Squamous cell | 0.0 |
| carcinoma | | carcinoma of tongue | |
| RL95-2-Uterine | 4.6 | SCC-15-Squamous cell | 0.0 |
| carcinoma | | carcinoma of tongue | |
| HelaS3-Cervical | 5.9 | CAL 27-Squamous cell | 7.1 |
| adenocarcinoma | | carcinoma of tongue | |

[0720] TABLE 23
Panel 4D

| | Rel. Exp. (%) | Rel. Exp. (%) | Rel. Exp. (%) | Rel. Exp. (%) |
|---|---|---|---|---|
| | Ag1522, Run | Ag1848, Run | Ag2263, Run | Ag2422, Run |
| Tissue Name | 145789191 | 160202841 | 151562852 | 159318890 |
| Secondary Th1 act | 0.0 | 0.1 | 0.0 | 0.2 |
| Secondary Th2 act | 0.0 | 0.0 | 0.0 | 0.0 |
| Secondary Tr1 act | 0.0 | 0.0 | 0.0 | 4.6 |
| Secondary Th1 rest | 0.1 | 0.0 | 0.1 | 0.0 |
| Secondary Th2 rest | 0.0 | 0.0 | 0.0 | 0.0 |
| Secondary Tr1 rest | 0.0 | 0.0 | 0.0 | 0.2 |
| Primary Th1 act | 0.1 | 0.2 | 0.2 | 1.0 |
| Primary Th2 act | 0.1 | 0.2 | 0.1 | 0.3 |
| Primary Tr1 act | 0.2 | 0.5 | 0.0 | 0.6 |
| Primary Th1 rest | 0.0 | 0.0 | 0.0 | 0.0 |
| Primary Th2 rest | 0.0 | 0.0 | 0.0 | 0.0 |
| Primary Tr1 rest | 0.0 | 0.0 | 0.0 | 0.0 |
| CD45RA CD4 | 4.9 | 6.3 | 8.5 | 10.6 |
| lymphocyte act | | | | |
| CD45RO CD4 | 0.0 | 0.0 | 0.0 | 0.0 |
| lymphocyte act | | | | |
| CD8 lymphocyte act | 0.0 | 0.0 | 0.0 | 0.0 |
| Secondary CD8 | 0.0 | 0.0 | 0.0 | 0.0 |
| lymphocyte rest | | | | |
| Secondary CD8 | 0.0 | 0.0 | 0.0 | 0.0 |
| lymphocyte act | | | | |
| CD4 lymphocyte none | 0.0 | 0.0 | 0.0 | 0.0 |
| 2ry Th1/Th2/Tr1_anti- | 0.0 | 0.0 | 0.0 | 0.0 |
| CD95 CH11 | | | | |
| LAK cells rest | 1.8 | 2.7 | 2.0 | 5.8 |
| LAK cells IL-2 | 0.0 | 0.0 | 0.0 | 0.0 |
| LAK cells IL-2 + IL-12 | 0.0 | 0.1 | 0.0 | 0.2 |
| LAK cells IL-2 + IFN | 0.0 | 0.1 | 0.0 | 0.2 |
| gamma | | | | |
| LAK cells IL-2 + IL-18 | 0.0 | 0.4 | 0.0 | 0.1 |
| LAK cells | 1.1 | 1.0 | 1.7 | 2.5 |
| PMA/ionomycin | | | | |
| NK Cells IL-2 rest | 0.0 | 0.1 | 0.0 | 0.0 |
| Two Way MLR 3 day | 0.0 | 0.1 | 0.2 | 0.2 |
| Two Way MLR 5 day | 0.2 | 0.3 | 0.8 | 0.6 |
| Two Way MLR 7 day | 0.5 | 0.2 | 0.1 | 0.3 |
| PBMC rest | 0.0 | 0.0 | 0.1 | 0.0 |
| PBMC PWM | 0.0 | 0.1 | 0.0 | 0.0 |
| PBMC PHA-L | 0.0 | 0.1 | 0.0 | 0.0 |
| Ramos (B cell) none | 0.0 | 0.0 | 0.0 | 0.0 |
| Ramos (B cell) | 0.0 | 0.0 | 0.0 | 0.0 |
| ionomycin | | | | |
| B lymphocytes PWM | 0.2 | 0.0 | 0.0 | 0.0 |
| B lymphocytes CD40L | 0.0 | 0.1 | 0.1 | 0.3 |
| and IL-4 | | | | |
| EOL-1 dbcAMP | 0.2 | 0.2 | 0.4 | 0.0 |
| EOL-1 dbcAMP | 0.1 | 0.4 | 0.2 | 0.6 |
| PMA/ionomycin | | | | |
| Dendritic cells none | 1.4 | 1.1 | 1.0 | 2.8 |
| Dendritic cells LPS | 0.3 | 0.4 | 0.3 | 0.4 |
| Dendritic cells anti- | 2.4 | 3.0 | 3.5 | 6.7 |
| CD40 | | | | |
| Monocytes rest | 0.8 | 0.8 | 0.6 | 1.3 |
| Monocytes LPS | 0.0 | 0.0 | 0.3 | 0.0 |
| Macrophages rest | 1.3 | 1.0 | 0.0 | 2.0 |
| Macrophages LPS | 0.0 | 0.2 | 0.1 | 0.4 |
| HUVEC none | 1.1 | 1.4 | 0.6 | 2.5 |
| HUVEC starved | 4.4 | 4.7 | 2.9 | 6.0 |
| HUVEC IL-1beta | 1.7 | 2.8 | 1.0 | 2.3 |
| HUVEC IFN gamma | 1.6 | 1.4 | 2.5 | 1.9 |
| HUVEC TNF alpha + | 0.3 | 0.3 | 0.5 | 0.5 |
| IFN gamma | | | | |
| HUVEC TNF alpha + | 0.2 | 0.3 | 0.3 | 1.3 |
| IL4 | | | | |
| HUVEC IL-11 | 0.9 | 1.2 | 2.2 | 0.5 |
| Lung Microvascular EC | 2.2 | 6.5 | 2.8 | 6.7 |
| none | | | | |
| Lung Microvascular EC | 12.7 | 11.9 | 8.5 | 15.5 |
| TNFalpha + IL-1beta | | | | |
| Microvascular Dermal | 32.1 | 30.8 | 22.4 | 22.4 |
| EC none | | | | |
| Microvascular Dermal | 16.3 | 16.2 | 8.8 | 14.4 |
| EC TNFalpha + IL- | | | | |
| 1beta | | | | |
| Bronchial epithelium | 24.0 | 31.2 | 15.1 | 50.7 |
| TNFalpha + IL1beta | | | | |
| Small airway epithelium | 8.8 | 5.9 | 6.7 | 12.8 |
| none | | | | |
| Small airway epithelium | 31.9 | 43.5 | 21.0 | 44.8 |
| TNFalpha + IL-1beta | | | | |
| Coronery artery SMC | 27.4 | 28.7 | 8.5 | 35.8 |
| rest | | | | |
| Coronery artery SMC | 12.9 | 21.6 | 27.4 | 17.8 |
| TNFalpha + IL-1beta | | | | |
| Astrocytes rest | 17.1 | 14.9 | 23.8 | 24.3 |
| Astrocytes TNFalpha + | 32.8 | 29.5 | 28.1 | 35.1 |
| IL-1beta | | | | |
| KU-812 (Basophil) rest | 1.0 | 1.8 | 1.3 | 0.7 |
| KU-812 (Basophil) | 1.4 | 3.3 | 2.0 | 3.7 |
| PMA/ionomycin | | | | |
| CCD1106 | 1.4 | 0.2 | 0.7 | 2.7 |
| (Keratinocytes) none | | | | |
| CCD1106 | 0.9 | 0.3 | 0.8 | 1.3 |
| (Keratinocytes) | | | | |
| TNFalpha + IL-1beta | | | | |
| Liver cirrhosis | 2.9 | 3.0 | 2.4 | 4.8 |
| Lupus kidney | 3.0 | 2.9 | 0.9 | 4.4 |
| NCI-H292 none | 10.4 | 13.7 | 5.6 | 18.8 |
| NCI-H292 IL-4 | 14.2 | 14.9 | 6.8 | 17.1 |
| NCI-H292 IL-9 | 13.2 | 16.7 | 9.3 | 12.8 |
| NCI-H292 IL-13 | 9.4 | 8.6 | 15.9 | 9.0 |
| NCI-H292 IFN gamma | 3.8 | 4.7 | 4.7 | 5.3 |
| HPAEC none | 1.2 | 1.0 | 1.6 | 2.8 |
| HPAEC TNF alpha + | 5.8 | 2.6 | 4.7 | 6.0 |
| IL-1 beta | | | | |
| Lung fibroblast none | 100.0 | 100.0 | 100.0 | 100.0 |
| Lung fibroblast TNF | 8.5 | 12.2 | 15.9 | 15.2 |
| alpha + IL-1 beta | | | | |
| Lung fibroblast IL-4 | 74.2 | 79.6 | 45.7 | 97.3 |
| Lung fibroblast IL-9 | 27.7 | 48.6 | 30.6 | 50.3 |
| Lung fibroblast IL-13 | 48.0 | 39.5 | 27.4 | 55.9 |
| Lung fibroblast IFN | 76.3 | 82.9 | 42.6 | 98.6 |
| gamma | | | | |
| Dermal fibroblast | 52.9 | 56.3 | 27.2 | 65.5 |
| CCD1070 rest | | | | |
| Dermal fibroblast | 33.9 | 42.6 | 19.8 | 46.7 |
| CCD1070 TNF alpha | | | | |
| Dermal fibroblast | 29.1 | 27.9 | 70.2 | 28.9 |
| CCD1070 IL-1 beta | | | | |
| Dermal fibroblast IFN | 6.1 | 3.6 | 8.9 | 7.9 |
| gamma | | | | |
| Dermal fibroblast IL-4 | 14.5 | 16.2 | 17.3 | 18.9 |
| IBD Colitis 2 | 0.1 | 0.1 | 0.2 | 0.5 |
| IBD Crohn's | 0.6 | 0.4 | 0.0 | 0.8 |
| Colon | 7.6 | 6.4 | 8.0 | 11.3 |
| Lung | 59.5 | 75.8 | 47.6 | 74.7 |
| Thymus | 16.5 | 17.3 | 10.2 | 19.6 |
| Kidney | 6.8 | 9.0 | 3.0 | 6.5 |

[0721] TABLE 24
Panel CNS_1

| | Rel. Exp. (%) Ag2263, | | Rel. Exp. (%) Ag2263, |
|---|---|---|---|
| Tissue Name | Run 171669090 | Tissue Name | Run 171669090 |
| BA4 Control | 22.8 | BA17 PSP | 11.2 |
| BA4 Control2 | 38.2 | BA17 PSP2 | 7.1 |
| BA4 | 3.7 | Sub Nigra Control | 100.0 |
| Alzheimer's2 | | | |
| BA4 Parkinson's | 45.7 | Sub Nigra Control2 | 51.8 |
| BA4 | 31.2 | Sub Nigra | 30.8 |
| Parkinson's2 | | Alzheimer's2 | |
| BA4 | 12.3 | Sub Nigra | 89.5 |
| Huntington's | | Parkinson's2 | |
| BA4 | 12.2 | Sub Nigra | 59.0 |
| Huntington's2 | | Huntington's | |
| BA4 PSP | 13.6 | Sub Nigra | 16.2 |
| | | Huntington's2 | |
| BA4 PSP2 | 42.6 | Sub Nigra PSP2 | 22.5 |
| BA4 Depression | 27.9 | Sub Nigra | 40.6 |
| | | Depression | |
| BA4 | 10.9 | Sub Nigra | 12.8 |
| Depression2 | | Depression2 | |
| BA7 Control | 28.3 | Glob Palladus | 36.1 |
| | | Control | |
| BA7 Control2 | 27.2 | Glob Palladus | 21.3 |
| | | Control2 | |
| BA7 | 5.5 | Glob Palladus | 26.1 |
| Alzheimer's2 | | Alzheimer's | |
| BA7 Parkinson's | 13.2 | Glob Palladus | 11.2 |
| | | Alzheimer's2 | |
| BA7 | 12.8 | Glob Palladus | 73.2 |
| Parkinson's2 | | Parkinson's | |
| BA7 | 14.8 | Glob Palladus | 15.7 |
| Huntington's | | Parkinson's2 | |
| BA7 | 22.2 | Glob Palladus PSP | 15.0 |
| Huntington's | | | |
| BA7 PSP | 29.1 | Glob Palladus PSP2 | 10.4 |
| BA7 PSP2 | 8.9 | Glob Palladus | 28.3 |
| | | Depression | |
| BA7 Depression | 5.4 | Temp Pole Control | 5.4 |
| BA9 Control | 14.3 | Temp Pole Control2 | 25.2 |
| BA9 Control2 | 57.0 | Temp Pole | 10.0 |
| | | Alzheimer's | |
| BA9 Alzheimer's | 5.5 | Temp Pole | 2.5 |
| | | Alzheimer's2 | |
| BA9 | 13.8 | Temp Pole | 15.5 |
| Alzheimer's2 | | Parkinson's | |
| BA9 Parkinson's | 16.2 | Temp Pole | 27.9 |
| | | Parkinson's2 | |
| BA9 | 21.0 | Temp Pole | 22.4 |
| Parkinson's | | Huntington's | |
| BA9 | 21.5 | Temp Pole PSP | 1.3 |
| Huntington's | | | |
| BA9 | 11.9 | Temp Pole PSP2 | 6.4 |
| Huntington's2 | | | |
| BA9 PSP | 27.7 | Temp Pole | 12.3 |
| | | Depression2 | |
| BA9 PSP2 | 5.9 | Cing Gyr Control | 48.3 |
| BA9 Depression | 11.0 | Cing Gyr Control2 | 28.1 |
| BA9 | 9.5 | Cing Gyr | 27.2 |
| Depression2 | | Alzheimer's | |
| BA17 Control | 25.0 | Cing Gyr | 13.1 |
| | | Alzheimer's2 | |
| BA17 Control2 | 45.7 | Cing Gyr Parkinson's | 29.7 |
| BA17 | 6.5 | Cing Gyr | 37.4 |
| Alzheimer's2 | | Parkinson's2 | |
| BA17 | 35.4 | Cing Gyr | 70.7 |
| Parkinson's | | Huntington's | |
| BA17 | 15.3 | Cing Gyr | 32.1 |
| Parkinson's2 | | Huntington's2 | |
| BA17 | 15.5 | Cing Gyr PSP | 42.6 |
| Huntington's | | | |
| BA17 | 8.1 | Cing Gyr PSP2 | 8.3 |
| Huntington's2 | | | |
| BA17 | 26.2 | Cing Gyr Depression | 20.6 |
| Depression | | | |
| BA17 | 59.9 | Cing Gyr | 36.3 |
| Depression2 | | Depression2 | |

[0722] CNS_Neurodegeneration_v1.0 Summary: Ag1848/Ag2263/Ag2422

[0723] Multiple experiments using different probe/primer sets produce results that are in good agreement. Highest expression of a NOV1 gene is detected in the occipital cortex of a control patient. Significant levels of expression are also detected in the hippocampus, inferior temporal cortex, and the superior temporal cortex of brain tissue from an Alzheimer's patient.

[0724] Based on its homology, a NOV1 gene product is most similar to an UNC5H receptor, which as a class is known to act both in axon guidance and neuronal migration during development, as well as in inducing apoptosis (except when stimulated by the ligand netrin-1). Panel CNS_Neurodegeneration_V1.0 shows a moderate increase (1.5 to 2-fold) in the temporal cortex of the Alzheimer's disease brain when compared to non-demented elderly either with or without a high amyloid plaque load [this difference is apparent after scaling the RTQ-PCR data based upon overall RNA amount/quality, and is most apparent on Aq2263]. Thus NOV1 gene represents a protein that differentiates demented and non-demented elderly who have a severe amyloid plaque load, making it an excellent drug target in Alzheimer's disease. The modulation and/or selective stimulation of this receptor may be of use in enhancing or directing compensatory synatogenesis and axon/dendritic outgrowth in response to neuronal death (stroke, head trauma) neurodegeneration (Alzheimer's, Parkinson's, Huntington's, spinocerebellar ataxia, progressive supranuclear palsy) or spinal cord injury. Furthermore, antagonism of this receptor may decrease apoptosis in Alzheimer's disease.

[0725] References:

[0726] 1. Ellezam B, Selles-Navarro I, Manitt C, Kennedy T E, McKerracher L. Expression of netrin-1 and its receptors DCC and UNC-5H2 after axotomy and during regeneration of adult rat retinal ganglion cells. Exp Neurol March;2000, 168(1):105-15

[0727] Netrins are a family of chemotropic factors that guide axon outgrowth during development; however, their function in the adult CNS remains to be established. We examined the expression of the netrin receptors DCC and UNC5H2 in adult rat retinal ganglion cells (RGCs) after grafting a peripheral nerve (PN) to the transected optic nerve and following optic nerve transection alone. In situ hybridization revealed that both Dcc and Unc5h2 mRNAs are expressed by normal adult RGCs. In addition, netrin-I was found to be constitutively expressed by RGCs. Quantitative analysis using in situ hybridization demonstrated that both Dcc and Unc5h2 were down-regulated by RGCs following axotomy. In the presence of an attached PN graft, Dcc and Unc5h2 were similarly down-regulated in surviving RGCs regardless of their success in regenerating an axon. Northern blot analysis demonstrated expression of netrin-l in both optic and sciatic nerve, and Western blot analysis revealed the presence of netrin protein in both nerves. Immunohistochemical analysis indicated that netrin protein was closely associated with glial cells in the optic nerve. These results suggest that netrin-1, DCC, and UNC5H2 may contribute to regulating the regenerative capacity of adult RGCs.

[0728] 2. Braisted J E, Catalano S M, Stimac R, Kennedy T E, Tessier-Lavigne M, Shatz C J, O'Leary DD Netrin-1 promotes thalamic axon growth and is required for proper development of the thalamocortical projection. J Neurosci Aug. 1; 2000 20(15):5792-801

[0729] The thalamocortical axon (TCA) projection originates in dorsal thalamus, conveys sensory input to the neocortex, and has a critical role in cortical development. We show that the secreted axon guidance molecule netrin-1 acts in vitro as an attractant and growth promoter for dorsal thalamic axons and is required for the proper development of the TCA projection in vivo. As TCAs approach the hypothalamus, they turn laterally into the ventral telencephalon and extend toward the cortex through a population of netrin-1-expressing cells. DCC and neogenin, receptors implicated in mediating the attractant effects of netrin-1, are expressed in dorsal thalamus, whereas unc5h2 and unc5h3, netrin-1 receptors implicated in repulsion, are not. In vitro, dorsal thalamic axons show biased growth toward a source of netrin-1, which can be abolished by netrin-1-blocking antibodies. Netrin-1 also enhances overall axon outgrowth from explants of dorsal thalamus. The biased growth of dorsal thalamic axons toward the internal capsule zone of ventral telencephalic explants is attenuated, but not significantly, by netrin-1-blocking antibodies, suggesting that it releases another attractant activity for TCAs in addition to netrin-1. Analyses of netrin-1 −/− mice reveal that the TCA projection through the ventral telencephalon is disorganized, their pathway is abnormally restricted, and fewer dorsal thalamic axons reach cortex. These findings demonstrate that netrin-1 promotes the growth of TCAs through the ventral telencephalon and cooperates with other guidance cues to control their pathfinding from dorsal thalamus to cortex.

[0730] Panel 1.2 Summary: Ag1522

[0731] Expression of a NOV1 gene is highest in CNS cancer cell lines (CT=26.1). Of nine tissue samples derived from CNS cancer cell lines, expression of a NOV1 gene occurs in all samples, with expression high in three samples, moderate in five samples and low in one sample. High expression is also detectable in melanoma cell lines. Significant expression of a NOV1 gene is seen in gastric cancer and all ten samples of lung cancer cell lines in this sample. Thus, expression of a NOV1 gene could be used to distinguish those cancer cell lines from normal tissues. In addition, therapeutic modulation of the expression, or activity of a NOV1 gene product, might be of use in the treatment of melanoma, gastric cancer, lung cancer and brain cancer.

[0732] Panel 1.3D Summary: Ag1522/Ag1848/Ag2263/Ag2422

[0733] Four experiments using different probe/primer sets on the same tissue panel produce results that are in excellent agreement. In all four experiments, highest expression of a NOV1 gene is detected in CNS cancer cell lines. Expression is also significant in lung cancer and melanoma cell lines and in healthy brain tissue from the hippocampus and thalamus regions. Thus, the expression of a NOV1 gene could be used to distinguish these tissue samples from other samples. Moreover, therapeutic modulation of the expression, or function, of the CG50126-01 gene, through the use of small molecule drugs or antibodies, might be beneficial in the treatment of melanoma, lung cancer and brain cancer.

[0734] Among metabolic tissues, there is high expression of a NOV1 gene in adult heart tissue (CT=27.8) and moderate expression in fetal heart, adult and fetal liver, pancreas, adrenal gland, thyroid and pituitary. This widespread expression of a NOV1 gene product in tissues with metabolic function suggests a possible role for a NOV1 gene product in metabolic disorders, including obesity and diabetes.

[0735] The UNC5H receptors act both in axon guidance and neuronal migration during development, as well as inducers of apoptosis (except when stimulated by the ligand netrin-1). This panel shows widespread expression of a NOV1 gene in the central nervous system. Please see CNS_neurodegeneration_v 1.0 for discussion of potential utility in the central nervous system.

[0736] Panel 2D Summary: Ag1522/Ag1848/Ag2263/Ag2422

[0737] Results from multiple experiments with four different probe and primer sets are in very good agreement. In all four experiments, highest expression of a NOV1 gene is detected in thyroid and ovarian cancers (CTs=27-30), with lower expression also seen in most of the other tissues on this panel. Thus, the expression of a NOV1 gene could be used to distinguish ovarian and thyroid cancer cell lines from other tissues. Moreover, therapeutic modulation of the expression this gene, or its function, through the use of small molecule drugs or antibodies, might be of benefit in the treatment of ovarian and thyroid cancer. In addition, experiments with the probe and primer set Ag2263 show differential expression between samples derived from lung cancer and their adjacent normal tissues. Thus, expression of a NOV1 gene could be used to distinguish cancerous lung tissue from normal lung tissue. Moreover, therapeutic modulation of the expression or function of this gene or its protein product, through the use of antibodies or small molecule drugs, might be of benefit in the treatment of lung cancer.

[0738] Panel 3D Summary: Ag2263

[0739] Expression of a NOV 1 gene occurs at moderate levels across all the tissues in this panel. Highest expression is detected in a small cell lung cancer (CT=30.6) and neuroblastoma (CT=30.7). In addition, significant expression is detected in a cluster of small cell lung cancer lines. Thus, this gene could be used to distinguish lung cancer cell lines from other samples. Moreover, therapeutic modulation of the CG50126-01 gene or its protein product, through the use of small molecule drugs or antibodies might be of benefit in the treatment of small cell lung cancer.

[0740] Panel 4D Summary: Ag1522/Ag1848/Ag2263/Ag2422

[0741] Experiments using each of the four probe and primer sets that correspond to a NOV1 gene produce results that are in excellent agreement. In all the experiments, expression of a NOV1 gene occurs at moderate to low levels in many of the tissues in the sample. Highest expression in each experiment occurs in lung fibroblasts (CT=29). Moderate expression in lung fibroblasts treated with IL-4 is also consistent among all four experiments (CT=30). Lower expression is also detected in a variety of fibroblasts, endothelial and smooth muscle cells. The expression of a NOV1 gene produces a complex profile; it is upregulated by TNF-alpha in small airway epithelium, but clearly downregulated by the same stimulus in lung fibroblasts. The gene most probably encodes a netrin receptor that may be important in understanding cell migration. Regulation of the protein encoded for by a NOV1 gene could potentially control the progression of keloid formation, emphysema and other conditions in which TNF-alpha and IL-1 beta are present and tissue remodeling may occur.

[0742] Panel CNS_{—}1 Summary: Ag2263

[0743] Expression of NOV1 is moderate to low across many of the tissues in this panel. Highest expression is detected in the substantia nigra (CT=31.4). Although no disease-specific expression is seen in this panel, the expression profile confirms the expression of this gene in the central nervous system. Please see CNS_neurodegeneration_v1.0 for potential utility of the CG50126-01 gene regarding the CNS.

[0744] NOV2

[0745] Expression of gene CG50718-01 was assessed using the primer-probe sets Ag1555 and Ag2315, described in Tables 25 and 26. Results of the RTQ-PCR runs are shown in Tables 27, 28, 29 and 30.

TABLE 25

Probe Name Ag1555

| | | | Start | Seq ID |
|---|---|---|---|---|
| Primers | Sequences | Length | Position | NO: |
| Forward | 5′-gaagtgaaagaatgtgcatggt-3′ | 22 | 6680 | 145 |
| Probe | TET-5′-caccagtgcattctggatctcttatca-3′-TAMRA | 27 | 6730 | 146 |
| Reverse | 5′-tgggctgattacttcccttatt-3′ | 22 | 6757 | 147 |

[0746] TABLE 26

Probe Name AG2315

| | | | Start | SEQ ID |
|---|---|---|---|---|
| Primers | Sequences | Length | Position | NO: |
| Forward | 5′-agatgagtcagtgccgttagc-3′ | 21 | 3711 | 148 |
| Probe | TET-5′-cctccacaaaatttgactttaatcaactg-3′-TAMRA | 29 | 3733 | 149 |
| Reverse | 5′-tccatttcagccatacaaagtc-3′ | 22 | 3769 | 150 |

[0747] TABLE 27
Panel 1.3D

| | Rel. | Rel. | Rel. | | Rel. | Rel. | Rel. |
|---|---|---|---|---|---|---|---|
| | Exp. (%) | Exp. (%) | Exp. (%) | | Exp. (%) | Exp. (%) | Exp. (%) |
| | Ag1555, | Ag1555, | Ag2315, | | Ag1555, | Ag1555, | Ag2315, |
| | Run | Run | Run | Tissue | Run | Run | Run |
| Tissue Name | 146380268 | 147775028 | 159198312 | Name | 146380268 | 147775028 | 159198312 |
| Liver | 0.0 | 0.0 | 0.0 | Kidney | 33.9 | 37.6 | 90.8 |
| adenocarcinoma | | | | (fetal) | | | |
| Pancreas | 5.8 | 1.6 | 3.9 | Renal ca. | 0.0 | 0.0 | 0.0 |
| | | | | 786-0 | | | |
| Pancreatic ca. | 0.0 | 0.0 | 0.0 | Renal ca. | 0.0 | 0.0 | 0.0 |
| CAPAN 2 | | | | A498 | | | |
| Adrenal gland | 0.0 | 1.9 | 0.0 | Renal ca. | 0.0 | 0.0 | 0.0 |
| | | | | RXF 393 | | | |
| Thyroid | 8.3 | 24.7 | 25.3 | Renal ca. | 0.0 | 0.0 | 0.0 |
| | | | | ACHN | | | |
| Salivary gland | 1.0 | 0.0 | 0.0 | Renal ca. | 0.0 | 1.4 | 0.0 |
| | | | | UO-31 | | | |
| Pituitary gland | 0.0 | 0.0 | 8.0 | Renal ca. | 0.0 | 0.0 | 0.0 |
| | | | | TK-10 | | | |
| Brain (fetal) | 0.6 | 0.0 | 3.8 | Liver | 0.0 | 0.0 | 0.0 |
| Brain (whole) | 1.3 | 1.6 | 3.3 | Liver (fetal) | 0.0 | 3.6 | 0.0 |
| Brain | 3.4 | 4.0 | 6.7 | Liver ca. | 0.0 | 0.0 | 0.0 |
| (amygdala) | | | | (hepatoblast) | | | |
| | | | | HepG2 | | | |
| Brain | 0.0 | 0.0 | 0.0 | Lung | 51.1 | 52.5 | 70.7 |
| (cerebellum) | | | | | | | |
| Brain | 1.2 | 0.6 | 5.9 | Lung (fetal) | 100.0 | 100.0 | 74.2 |
| (hippocampus) | | | | | | | |
| Brain | 0.0 | 0.0 | 0.0 | Lung ca. | 0.0 | 0.0 | 0.0 |
| (substantia | | | | (small cell) | | | |
| nigra) | | | | LX-1 | | | |
| Brain | 3.2 | 1.3 | 4.0 | Lung ca. | 2.4 | 0.0 | 32.5 |
| (thalamus) | | | | (small cell) | | | |
| | | | | NCI-H69 | | | |
| Cerebral Cortex | 0.0 | 0.0 | 12.4 | Lung ca. | 0.0 | 0.0 | 10.7 |
| | | | | (s.cell var.) | | | |
| | | | | SHP-77 | | | |
| Spinal cord | 1.1 | 0.0 | 0.0 | Lung ca. | 0.0 | 0.0 | 0.0 |
| | | | | (large | | | |
| | | | | cell)NCI- | | | |
| | | | | H460 | | | |
| glio/astro U87- | 0.0 | 2.7 | 0.0 | Lung ca. | 0.0 | 0.0 | 0.0 |
| MG | | | | (non-sm. | | | |
| | | | | cell) A549 | | | |
| glio/astro U- | 27.2 | 34.6 | 15.8 | Lung ca. | 0.0 | 0.0 | 0.0 |
| 118-MG | | | | (non-s.cell) | | | |
| | | | | NCI-H23 | | | |
| astrocytoma | 5.4 | 13.8 | 16.0 | Lung ca. | 0.7 | 0.9 | 0.0 |
| SW1783 | | | | (non-s.cell) | | | |
| | | | | HOP-62 | | | |
| neuro*; met | 0.0 | 0.6 | 0.0 | Lung ca. | 9.9 | 5.4 | 20.9 |
| SK-N-AS | | | | (non-s.cl) | | | |
| | | | | NCI-H522 | | | |
| astrocytoma SF- | 0.8 | 0.0 | 0.0 | Lung ca. | 0.0 | 0.0 | 0.0 |
| 539 | | | | (squam.) SW | | | |
| | | | | 900 | | | |
| astrocytoma | 0.0 | 0.0 | 0.0 | Lung ca. | 1.3 | 2.2 | 9.0 |
| SNB-75 | | | | (squam.) | | | |
| | | | | NCI-H596 | | | |
| glioma SNB-19 | 0.0 | 0.0 | 0.0 | Mammary | 13.0 | 26.6 | 11.5 |
| | | | | gland | | | |
| glioma U251 | 0.0 | 0.0 | 0.0 | Breast ca.* | 3.9 | 0.9 | 15.6 |
| | | | | (pl.ef) | | | |
| | | | | MCF-7 | | | |
| glioma SF-295 | 1.3 | 3.3 | 0.0 | Breast ca.* | 0.0 | 0.0 | 0.0 |
| | | | | (pl.ef) | | | |
| | | | | MDA-MB- | | | |
| | | | | 231 | | | |
| Heart (Fetal) | 0.0 | 0.0 | 7.4 | Breast ca.* | 0.0 | 0.0 | 6.1 |
| | | | | (pl. ef) | | | |
| | | | | T47D | | | |
| Heart | 0.0 | 5.7 | 0.0 | Breast ca. | 0.0 | 0.0 | 0.0 |
| | | | | BT-549 | | | |
| Skeletal muscle | 3.5 | 1.6 | 15.1 | Breast ca. | 0.0 | 0.0 | 0.0 |
| (Fetal) | | | | MDA-N | | | |
| Skeletal muscle | 0.0 | 1.4 | 2.5 | Ovary | 5.2 | 1.6 | 5.8 |
| Bone marrow | 1.0 | 4.1 | 0.0 | Ovarian ca. | 0.0 | 0.0 | 6.7 |
| | | | | OVCAR-3 | | | |
| Thymus | 1.0 | 0.0 | 8.8 | Ovarian ca. | 0.0 | 0.0 | 0.0 |
| | | | | OVCAR-4 | | | |
| Spleen | 0.0 | 0.0 | 0.0 | Ovarian ca. | 0.0 | 0.0 | 0.0 |
| | | | | OVCAR-5 | | | |
| Lymph node | 3.7 | 4.8 | 7.1 | Ovarian ca. | 0.0 | 0.0 | 0.0 |
| | | | | OVCAR-8 | | | |
| Colorectal | 0.0 | 0.0 | 0.0 | Ovarian ca. | 0.0 | 0.0 | 0.0 |
| | | | | IGROV-1 | | | |
| Stomach | 1.2 | 2.3 | 0.0 | Ovarian ca. | 0.0 | 0.0 | 0.0 |
| | | | | (ascites) SK- | | | |
| | | | | OV-3 | | | |
| Small intestine | 2.2 | 6.7 | 0.0 | Uterus | 0.0 | 0.9 | 0.0 |
| Colon ca. | 0.0 | 0.0 | 0.0 | Placenta | 11.8 | 27.7 | 23.7 |
| SW480 | | | | | | | |
| Colon ca.* | 0.0 | 0.0 | 0.0 | Prostate | 3.5 | 0.9 | 3.0 |
| SW620 (SW480 | | | | | | | |
| met) | | | | | | | |
| Colon ca. HT29 | 0.0 | 0.0 | 0.0 | Prostate ca.* | 0.0 | 0.0 | 0.0 |
| | | | | (bone met) | | | |
| | | | | PC-3 | | | |
| Colon ca. HCT- | 0.0 | 0.0 | 2.7 | Testis | 58.2 | 67.4 | 21.5 |
| 116 | | | | | | | |
| Colon ca. | 0.0 | 0.0 | 0.0 | Melanoma | 22.7 | 52.1 | 18.2 |
| CaCo-2 | | | | Hs688(A).T | | | |
| CC Well to | 0.0 | 0.0 | 0.0 | Melanoma* | 4.8 | 4.2 | 0.0 |
| Mod Diff | | | | (met) | | | |
| (ODO3866) | | | | Hs688(B).T | | | |
| Colon ca. HCC- | 0.0 | 0.0 | 0.0 | Melanoma | 0.0 | 1.5 | 0.0 |
| 2998 | | | | UACC-62 | | | |
| Gastric ca. | 0.0 | 0.0 | 0.0 | Melanoma | 0.0 | 0.0 | 0.0 |
| (liver met) NCI- | | | | M14 | | | |
| N87 | | | | | | | |
| Bladder | 2.0 | 0.0 | 6.1 | Melanoma | 0.0 | 0.0 | 0.0 |
| | | | | LOX IMVI | | | |
| Trachea | 2.4 | 3.6 | 0.0 | Melanoma* | 0.0 | 0.0 | 0.0 |
| | | | | (met) SK- | | | |
| | | | | MEL-5 | | | |
| Kidney | 15.5 | 17.8 | 22.2 | Adipose | 38.2 | 40.6 | 100.0 |

[0748] TABLE 28
Panel 2D

| | Rel. | Rel. | Rel. | | Rel. | Rel. | Rel. |
|---|---|---|---|---|---|---|---|
| | Exp. (%) | Exp. (%) | Exp. (%) | | Exp. (%) | Exp. (%) | Exp. (%) |
| | Ag1555, | Ag1555, | Ag2315, | | Ag1555, | Ag1555, | Ag2315, |
| | Run | Run | Run | Tissue | Run | Run | Run |
| Tissue Name | 147775063 | 159601974 | 159200827 | Name | 147775063 | 159601974 | 159200827 |
| Normal | 3.8 | 7.1 | 12.4 | Kidney | 2.9 | 1.2 | 1.7 |
| Colon | | | | Margin | | | |
| | | | | 8120608 | | | |
| CC Well to | 1.0 | 0.0 | 2.3 | Kidney | 0.0 | 0.0 | 0.0 |
| Mod Diff | | | | Cancer | | | |
| (ODO3866) | | | | 8120613 | | | |
| CC Margin | 0.0 | 0.0 | 0.7 | Kidney | 1.2 | 2.6 | 1.8 |
| (ODO3866) | | | | Margin | | | |
| | | | | 8120614 | | | |
| CC Gr.2 | 0.0 | 0.0 | 0.0 | Kidney | 2.7 | 2.6 | 2.1 |
| rectosigmoid | | | | Cancer | | | |
| (ODO3868) | | | | 9010320 | | | |
| CC Margin | 0.0 | 0.7 | 0.0 | Kidney | 6.6 | 5.9 | 4.9 |
| (ODO3868) | | | | Margin | | | |
| | | | | 9010321 | | | |
| CC Mod Diff | 0.0 | 0.0 | 0.0 | Normal | 0.0 | 0.0 | 1.8 |
| (ODO3920) | | | | Uterus | | | |
| CC Margin | 0.0 | 0.0 | 2.2 | Uterine | 0.0 | 0.0 | 4.5 |
| (ODO3920) | | | | Cancer | | | |
| | | | | 064011 | | | |
| CC Gr.2 | 0.0 | 0.0 | 0.0 | Normal | 34.9 | 27.4 | 11.4 |
| ascend colon | | | | Thyroid | | | |
| (ODO3921) | | | | | | | |
| CC Margin | 0.0 | 0.0 | 0.0 | Thyroid | 2.9 | 7.2 | 7.9 |
| (ODO3921) | | | | Cancer | | | |
| CC from | 1.6 | 1.1 | 0.0 | Thyroid | 1.3 | 3.3 | 2.0 |
| Partial | | | | Cancer | | | |
| Hepatectomy | | | | A302152 | | | |
| (ODO4309) | | | | | | | |
| Mets | | | | | | | |
| Liver Margin | 0.0 | 0.0 | 2.0 | Thyroid | 49.7 | 69.7 | 72.2 |
| (ODO4309) | | | | Margin | | | |
| | | | | A302153 | | | |
| Colon mets to | 2.0 | 1.0 | 0.5 | Normal | 10.0 | 8.9 | 25.3 |
| lung | | | | Breast | | | |
| (OD04451- | | | | | | | |
| 01) | | | | | | | |
| Lung Margin | 8.6 | 10.0 | 10.9 | Breast | 10.2 | 3.0 | 1.1 |
| (OD04451- | | | | Cancer | | | |
| 02) | | | | | | | |
| Normal | 4.2 | 12.2 | 1.4 | Breast | 0.0 | 2.8 | 3.9 |
| Prostate | | | | Cancer | | | |
| 6546-1 | | | | (OD04590- | | | |
| | | | | 01) | | | |
| Prostate | 0.0 | 0.0 | 3.4 | Breast | 7.8 | 7.3 | 7.9 |
| Cancer | | | | Cancer | | | |
| (OD04410) | | | | Mets | | | |
| | | | | (OD04590- | | | |
| | | | | 03) | | | |
| Prostate | 0.8 | 6.4 | 2.2 | Breast | 4.1 | 8.0 | 3.5 |
| Margin | | | | Cancer | | | |
| (OD04410) | | | | Metastasis | | | |
| Prostate | 9.5 | 11.7 | 19.6 | Breast | 0.0 | 0.0 | 1.2 |
| Cancer | | | | Cancer | | | |
| (OD04720- | | | | | | | |
| 01) | | | | | | | |
| Prostate | 10.0 | 11.3 | 24.5 | Breast | 3.7 | 2.9 | 0.9 |
| Margin | | | | Cancer | | | |
| (OD04720- | | | | | | | |
| 02) | | | | | | | |
| Normal Lung | 59.9 | 61.1 | 87.7 | Breast | 2.2 | 1.1 | 1.5 |
| | | | | Cancer | | | |
| | | | | 9100266 | | | |
| Lung Met to | 0.0 | 0.0 | 0.0 | Breast | 0.0 | 0.0 | 0.5 |
| Muscle | | | | Margin | | | |
| (ODO4286) | | | | 9100265 | | | |
| Muscle | 0.9 | 0.0 | 1.8 | Breast | 0.7 | 1.1 | 1.9 |
| Margin | | | | Cancer | | | |
| (ODO4286) | | | | A209073 | | | |
| Lung | 1.9 | 2.8 | 1.7 | Breast | 0.0 | 1.2 | 0.9 |
| Malignant | | | | Margin | | | |
| Cancer | | | | A2090734 | | | |
| (OD03126) | | | | | | | |
| Lung Margin | 36.3 | 35.6 | 43.8 | Normal | 0.0 | 0.0 | 0.0 |
| (OD03126) | | | | Liver | | | |
| Lung Cancer | 2.2 | 4.4 | 4.3 | Liver | 0.0 | 0.0 | 0.6 |
| (OD04404) | | | | Cancer | | | |
| Lung Margin | 9.5 | 4.2 | 8.4 | Liver | 0.0 | 0.0 | 0.0 |
| (OD04404) | | | | Cancer | | | |
| | | | | 1025 | | | |
| Lung Cancer | 0.0 | 0.0 | 0.0 | Liver | 0.0 | 0.0 | 0.0 |
| (OD04565) | | | | Cancer | | | |
| | | | | 1026 | | | |
| Lung Margin | 10.8 | 9.7 | 14.1 | Liver | 0.0 | 1.0 | 0.6 |
| (OD04565) | | | | Cancer | | | |
| | | | | 6004-T | | | |
| Lung Cancer | 0.0 | 0.0 | 0.0 | Liver | 0.0 | 0.0 | 0.0 |
| (OD04237- | | | | Tissue | | | |
| 01) | | | | 6004-N | | | |
| Lung Margin | 30.1 | 18.4 | 29.3 | Liver | 0.0 | 0.0 | 0.0 |
| (OD04237- | | | | Cancer | | | |
| 02) | | | | 6005-T | | | |
| Ocular Mel | 0.0 | 0.0 | 0.6 | Liver | 0.0 | 0.0 | 0.0 |
| Met to Liver | | | | Tissue | | | |
| (ODO4310) | | | | 6005-N | | | |
| Liver Margin | 1.0 | 2.0 | 0.0 | Normal | 4.7 | 2.2 | 2.9 |
| (ODO4310) | | | | Bladder | | | |
| Melanoma | 0.0 | 0.0 | 0.0 | Bladder | 0.0 | 0.0 | 0.0 |
| Metastasis | | | | Cancer | | | |
| Lung Margin | 25.7 | 47.0 | 49.0 | Bladder | 0.0 | 4.2 | 5.5 |
| (OD04321) | | | | Cancer | | | |
| Normal | 86.5 | 100.0 | 100.0 | Bladder | 0.7 | 1.6 | 1.1 |
| Kidney | | | | Cancer | | | |
| | | | | (OD04718- | | | |
| | | | | 01) | | | |
| Kidney Ca, | 2.2 | 0.0 | 1.1 | Bladder | 4.4 | 0.9 | 6.3 |
| Nuclear grade | | | | Normal | | | |
| 2 (OD04338) | | | | Adjacent | | | |
| | | | | (OD04718- | | | |
| | | | | 03) | | | |
| Kidney | 55.1 | 35.8 | 58.2 | Normal | 1.7 | 0.0 | 0.9 |
| Margin | | | | Ovary | | | |
| (OD04338) | | | | | | | |
| Kidney Ca | 0.0 | 0.0 | 0.0 | Ovarian | 0.0 | 4.2 | 3.3 |
| Nuclear grade | | | | Cancer | | | |
| 1/2 | | | | | | | |
| (OD04339) | | | | | | | |
| Kidney | 77.9 | 63.7 | 77.9 | Ovarian | 0.0 | 0.0 | 0.0 |
| Margin | | | | Cancer | | | |
| (OD04339) | | | | (OD04768- | | | |
| | | | | 07) | | | |
| Kidney Ca, | 1.7 | 0.0 | 0.0 | Ovary | 9.4 | 5.5 | 6.9 |
| Clear cell | | | | Margin | | | |
| type | | | | (OD04768- | | | |
| (OD04340) | | | | 08) | | | |
| Kidney | 100.0 | 53.2 | 62.4 | Normal | 0.0 | 0.0 | 0.0 |
| Margin | | | | Stomach | | | |
| (OD04340) | | | | | | | |
| Kidney Ca, | 25.9 | 23.2 | 0.0 | Gastric | 0.0 | 0.0 | 1.5 |
| Nuclear grade | | | | Cancer | | | |
| 3 (OD04348) | | | | 9060358 | | | |
| Kidney | 40.9 | 50.3 | 54.7 | Stomach | 0.0 | 0.0 | 2.0 |
| Margin | | | | Margin | | | |
| (OD04348) | | | | 9060359 | | | |
| Kidney | 0.6 | 0.0 | 0.0 | Gastric | 0.9 | 1.2 | 1.8 |
| Cancer | | | | Cancer | | | |
| (OD04622- | | | | 9060395 | | | |
| 01) | | | | | | | |
| Kidney | 0.0 | 0.0 | 1.4 | Stomach | 0.0 | 1.0 | 0.7 |
| Margin | | | | Margin | | | |
| (OD04622- | | | | 9060394 | | | |
| 03) | | | | | | | |
| Kidney | 0.0 | 0.0 | 0.0 | Gastric | 0.0 | 0.0 | 0.0 |
| Cancer | | | | Cancer | | | |
| (OD04450- | | | | 9060397 | | | |
| 01) | | | | | | | |
| Kidney | 40.3 | 51.1 | 50.7 | Stomach | 0.0 | 0.0 | 0.0 |
| Margin | | | | Margin | | | |
| (OD04450- | | | | 9060396 | | | |
| 03) | | | | | | | |
| Kidney | 0.0 | 0.0 | 0.0 | Gastric | 0.0 | 0.0 | 2.5 |
| Cancer | | | | Cancer | | | |
| 8120607 | | | | 064005 | | | |

[0749] TABLE 29
Panel 4D

| | Rel. Exp. (%) | Rel. Exp. (%) | | Rel. Exp. (%) | Rel. Exp. (%) |
|---|---|---|---|---|---|
| | Ag1555, Run | Ag2315, Run | | Ag1555, Run | Ag2315, Run |
| Tissue Name | 147775116 | 159202089 | Tissue Name | 147775116 | 159202089 |
| Secondary Th1 act | 0.0 | 0.0 | HUVEC IL-1beta | 0.0 | 0.0 |
| Secondary Th2 act | 0.0 | 0.0 | HUVEC IFN | 0.0 | 0.0 |
| | | | gamma | | |
| Secondary Tr1 act | 0.0 | 0.7 | HUVEC TNF | 0.0 | 0.0 |
| | | | alpha + IFN gamma | | |
| Secondary Th1 rest | 0.0 | 0.0 | HUVEC TNF | 0.0 | 0.0 |
| | | | alpha + IL4 | | |
| Secondary Th2 rest | 0.0 | 0.0 | HUVEC IL-11 | 0.0 | 0.0 |
| Secondary Tr1 rest | 0.0 | 0.0 | Lung Microvascular | 0.0 | 0.0 |
| | | | EC none | | |
| Primary Th1 act | 0.0 | 0.0 | Lung Microvascular | 0.0 | 0.0 |
| | | | EC TNFalpha + IL- | | |
| | | | 1beta | | |
| Primary Th2 act | 0.0 | 0.0 | Microvascular | 0.0 | 0.0 |
| | | | Dermal EC none | | |
| Primary Tr1 act | 0.0 | 0.0 | Microsvasular | 0.0 | 0.0 |
| | | | Dermal EC | | |
| | | | TNFalpha + IL- | | |
| | | | 1beta | | |
| Primary Th1 rest | 0.0 | 0.0 | Bronchial | 0.0 | 0.0 |
| | | | epithelium | | |
| | | | TNFalpha + | | |
| | | | IL1beta | | |
| Primary Th2 rest | 0.0 | 0.0 | Small airway | 0.0 | 0.0 |
| | | | epithelium none | | |
| Primary Tr1 rest | 0.0 | 0.0 | Small airway | 0.0 | 0.0 |
| | | | epithelium | | |
| | | | TNFalpha + IL- | | |
| | | | 1beta | | |
| CD45RA CD4 | 3.3 | 5.0 | Coronery artery | 1.0 | 2.3 |
| lymphocyte act | | | SMC rest | | |
| CD45RO CD4 | 0.0 | 0.0 | Coronery artery | 3.7 | 1.2 |
| lymphocyte act | | | SMC TNFalpha + | | |
| | | | IL-1beta | | |
| CD8 lymphocyte act | 0.0 | 0.0 | Astrocytes rest | 3.2 | 0.5 |
| Secondary CD8 | 0.0 | 0.0 | Astrocytes | 1.0 | 1.5 |
| lymphocyte rest | | | TNFalpha + IL- | | |
| | | | 1beta | | |
| Secondary CD8 | 0.0 | 0.0 | KU-812 (Basophil) | 0.0 | 0.0 |
| lymphocyte act | | | rest | | |
| CD4 lymphocyte | 0.0 | 0.0 | KU-812 (Basophil) | 0.0 | 0.0 |
| none | | | PMA/ionomycin | | |
| 2ry | 0.0 | 0.0 | CCD1106 | 0.0 | 0.0 |
| Th1/Th2/Tr1_anti- | | | (Keratinocytes) | | |
| CD95 CH11 | | | none | | |
| LAK cells rest | 0.0 | 0.0 | CCD1106 | 0.0 | 0.0 |
| | | | (Keratinocytes) | | |
| | | | TNFalpha + IL- | | |
| | | | 1beta | | |
| LAK cells IL-2 | 0.0 | 0.0 | Liver cirrhosis | 1.4 | 3.8 |
| LAK cells IL-2 + IL- | 0.0 | 0.0 | Lupus kidney | 0.0 | 0.8 |
| 12 | | | | | |
| LAK cells IL-2 + IFN | 0.0 | 0.0 | NCI-H292 none | 0.0 | 0.0 |
| gamma | | | | | |
| LAK cells IL-2 + IL- | 0.0 | 0.0 | NCI-H292 IL-4 | 0.0 | 2.3 |
| 18 | | | | | |
| LAK cells | 0.0 | 0.0 | NCI-H292 IL-9 | 0.0 | 0.5 |
| PMA/ionomycin | | | | | |
| NK Cells IL-2 rest | 0.0 | 0.0 | NCI-H292 IL-13 | 0.0 | 1.3 |
| Two Way MLR 3 | 0.0 | 0.0 | NCI-H292 IFN | 0.0 | 0.0 |
| day | | | gamma | | |
| Two Way MLR 5 | 0.0 | 0.0 | HPAEC none | 0.0 | 0.0 |
| day | | | | | |
| Two Way MLR 7 | 0.0 | 0.0 | HPAEC TNF | 0.0 | 0.0 |
| day | | | alpha + IL-1 beta | | |
| PBMC rest | 0.0 | 0.0 | Lung fibroblast | 0.0 | 0.9 |
| | | | none | | |
| PBMC PWM | 0.0 | 0.0 | Lung fibroblast | 0.0 | 0.0 |
| | | | TNF alpha + IL-1 | | |
| | | | beta | | |
| PBMC PHA-L | 0.0 | 0.0 | Lung fibroblast IL-4 | 0.0 | 0.0 |
| Ramos (B cell) none | 0.0 | 0.0 | Lung fibroblast IL-9 | 5.7 | 1.3 |
| Ramos (B cell) | 0.0 | 0.0 | Lung fibroblast IL- | 1.5 | 1.5 |
| ionomycin | | | 13 | | |
| B lymphocytes | 0.0 | 0.0 | Lung fibroblast IFN | 0.0 | 1.7 |
| PWM | | | gamma | | |
| B lymphocytes | 0.0 | 0.0 | Dermal fibroblast | 12.9 | 17.2 |
| CD40L and IL-4 | | | CCD1070 rest | | |
| EOL-1 dbcAMP | 0.0 | 0.0 | Dermal fibroblast | 18.6 | 12.0 |
| | | | CCD1070 TNF | | |
| | | | alpha | | |
| EOL-1 dbcAMP | 0.0 | 0.0 | Dermal fibroblast | 6.1 | 2.9 |
| PMA/ionomycin | | | CCD1070 IL-1 beta | | |
| Dendritic cells none | 0.0 | 0.0 | Dermal fibroblast | 0.0 | 0.0 |
| | | | IFN gamma | | |
| Dendritic cells LPS | 0.0 | 0.0 | Dermal fibroblast | 1.4 | 0.6 |
| | | | IL-4 | | |
| Dendritic cells anti- | 0.0 | 0.0 | IBD Colitis 2 | 0.0 | 1.4 |
| CD40 | | | | | |
| Monocytes rest | 0.0 | 0.0 | IBD Crohn's | 0.0 | 0.0 |
| Monocytes LPS | 0.0 | 0.0 | Colon | 0.6 | 0.0 |
| Macrophages rest | 0.0 | 0.0 | Lung | 4.0 | 11.7 |
| Macrophages LPS | 0.0 | 0.0 | Thymus | 100.0 | 100.0 |
| HUVEC none | 0.0 | 0.0 | Kidney | 4.2 | 5.3 |
| HUVEC starved | 0.0 | 0.0 | | | |

[0750] TABLE 30
Panel 5D

| | Rel. Exp. (%) | | Rel. Exp. (%) |
|---|---|---|---|
| | Ag2315, Run | | Ag2315, Run |
| Tissue Name | 169275446 | Tissue Name | 169275446 |
| 97457_Patient- | 84.1 | 94709_Donor 2 AM-A_adipose | 13.6 |
| 02go_adipose | | | |
| 97476_Patient- | 0.6 | 94710_Donor 2 AM-B_adipose | 9.3 |
| 07sk_skeletal muscle | | | |
| 97477_Patient- | 0.0 | 94711_Donor 2 AM-C_adipose | 3.6 |
| 07ut_uterus | | | |
| 97478_Patient- | 7.2 | 94712_Donor 2 AD-A_adipose | 8.7 |
| 07pl_placenta | | | |
| 97481_Patient- | 4.4 | 94713_Donor 2 AD-B_adipose | 17.1 |
| 08sk_skeletal muscle | | | |
| 97482_Patient- | 0.5 | 94714_Donor 2 AD-C_adipose | 21.6 |
| 08ut_uterus | | | |
| 97483_Patient- | 6.5 | 94742_Donor 3 U - | 9.0 |
| 08pl_placenta | | A_Mesenchymal Stem Cells | |
| 97486_Patient- | 0.0 | 94743_Donor 3 U - | 7.3 |
| 09sk_skeletal muscle | | B_Mesenchymal Stem Cells | |
| 97487_Patient- | 0.5 | 94730_Donor 3 AM-A_adipose | 14.8 |
| 09ut_uterus | | | |
| 97488_Patient- | 6.1 | 94731_Donor 3 AM-B_adipose | 13.9 |
| 09pl_placenta | | | |
| 97492_Patient- | 0.0 | 94732_Donor 3 AM-C_adipose | 5.9 |
| 10ut_uterus | | | |
| 97493_Patient- | 7.8 | 94733_Donor 3 AD-A_adipose | 5.4 |
| 10pl_placenta | | | |
| 97495_Patient- | 100.0 | 94734_Donor 3 AD-B_adipose | 4.7 |
| 11go_adipose | | | |
| 97496_Patient- | 0.6 | 94735_Donor 3 AD-C_adipose | 9.3 |
| 11sk_skeletal muscle | | | |
| 97497_Patient- | 1.0 | 77138_Liver_HepG2untreated | 6.9 |
| 11ut_uterus | | | |
| 97498_Patient- | 7.3 | 73556_Heart_Cardiac stromal cells | 0.0 |
| 11pl_placenta | | (primary) | |
| 97500_Patient- | 61.6 | 81735_Small Intestine | 1.5 |
| 12go_adipose | | | |
| 97501_Patient- | 3.2 | 72409_Kidney_Proximal | 0.0 |
| 12sk_skeletal muscle | | Convoluted Tubule | |
| 97502_Patient- | 1.4 | 82685_Small intestine_Duodenum | 0.0 |
| 12ut_uterus | | | |
| 97503_Patient- | 1.5 | 90650_Adrenal_Adrenocortical | 0.0 |
| 12pl_placenta | | adenoma | |
| 94721_Donor 2 U - | 14.4 | 72410_Kidney_HRCE | 0.0 |
| A_Mesenchymal Stem | | | |
| Cells | | | |
| 94722_Donor 2 U - | 6.7 | 72411_Kidney_HRE | 0.0 |
| B_Mesenchymal Stem | | | |
| Cells | | | |
| 94723_Donor 2 U - | 6.0 | 73139_Uterus_Uterine smooth | 0.0 |
| C_Mesenchymal Stem | | muscle cells | |
| Cells | | | |

[0751] Panel 1.3D Summary: Ag1555/2315 Highest expression of the CG50718-01 gene is seen in adipose and the fetal lung (CTs=31.8-34.4). Results from three experiments with two different probe and primer sets produce similar expression profiles. Low but significant expression is also seen in the thyroid. Biologic cross-talk between the thyroid and adipose tissue is believed to be a component of some forms of obesity. Thus, the CG50718-01 gene product may be an important small molecule target for the treatment of obesity or other metabolic disorders.

[0752] In addition, the CG50718-01 gene appears to be expressed at significant levels in lung and kidney tissues from both fetal and adult sources, but not in any samples derived from lung or kidney cancer cell lines. Thus, expression of this gene could potentially be used to differentiate between normal lung and kidney tissue and lung and kidney cancer. Furthermore, therapeutic modulation of the CG50718-01 gene product may be beneficial in the treatment of lung and kidney cancers.

[0753] Please note that two other experiments with the probe and primer set Ag2315 had low/undetectable levels of expression in all the samples on this panel. (Data not shown.)

[0754] Panel 2D Summary: Ag1555/2315 Three experiments with two different probe and primer sets produce results that are in excellent agreement with highest expression of the CG50718-01 gene in normal kidney tissue (CTs=30.7-32.4). There are also significant levels of expression in samples derived from normal lung tissue, a result that is in concordance with the expression seen in Panel 1.3D. This gene appears to be preferentially expressed in healthy tissue, when compared to adjacent cancerous tissue. Thus, expression of the CG50718-01 gene could be used to distinguish normal kideny and lung tissue from malignant kidney and lung tissue. Moreover, therapeutic modulation of this gene, through small molecule drugs, antibodies or protein therapeutics might be of benefit in the treatment of kidney cancer and lung cancer.

[0755] Panel 3D Summary: Ag2315 Expression is low/undetectable in all the samples in this panel (CT>35). (Data not shown.)

[0756] Panel 4D Summary: Ag1555/Ag2315 The CG50718-01 transcript is detected at significant levels in the thymus (CT 31.48) and at lower levels in dermal fibroblasts (CT 33.91). This transcript encodes a protein that could potentially serve as a marker for thymus tissue and may also be involved in skin homeostasis. Therapeutics designed with the protein encoded by the CG50718-01 transcript could be important for maintaining or restoring normal function to these organs during inflammation.

[0757] Panel 5D Summary: Ag2315 is modestly expressed (CT values 31-34) in human adipose tissue and in cultured human adipocytes. This expression is in agreement with the significant levels of expression in adipose detected in Panel 1.3D. Thus, this gene product may be a small molecule target for the treatment of obesity.

[0758] NOV3

[0759] Expression of NOV3 was assessed using the primer-probe set Ag2304, described in Table 31. Results of the RTQ-PCR runs are shown in Tables 32, 33, 34 and 35.

TABLE 31

Probe Name Ag2304

| | | | Start | SEQ ID |
|---|---|---|---|---|
| Primers | Sequences | Length | Position | NO: |
| Forward | 5′-accttaagtcctgccaacaatt-3′ | 22 | 4100 | 151 |
| Probe | TET-5′-ttacagagtccaaaattgtggatccca-3′-TAMRA | 26 | 4147 | 152 |
| Reverse | 5′-tgatcccttccagaatttgac-3′ | 21 | 4173 | 153 |

[0760] TABLE 32
CNS_neurodegeneration_v1.0

| | Rel. Exp. | | Rel. Exp. |
|---|---|---|---|
| | (%) Ag2304, | | (%) Ag2304, |
| | Run | | Run |
| Tissue Name | 206262286 | Tissue Name | 206262286 |
| AD 1 Hippo | 0.0 | Control (Path) 3 | 7.3 |
| | | Temporal Ctx | |
| AD 2 Hippo | 38.4 | Control (Path) 4 | 29.5 |
| | | Temporal Ctx | |
| AD 3 Hippo | 8.5 | AD 1 Occipital Ctx | 16.5 |
| AD 4 Hippo | 9.5 | AD 2 Occipital Ctx | 0.0 |
| | | (Missing) | |
| AD 5 Hippo | 100.0 | AD 3 Occipital Ctx | 8.7 |
| AD 6 Hippo | 70.7 | AD 4 Occipital Ctx | 22.2 |
| Control 2 Hippo | 44.8 | AD 5 Occipital Ctx | 45.1 |
| Control 4 Hippo | 13.3 | AD 5 Occipital Ctx | 0.0 |
| Control (Path) 3 | 0.0 | Control 1 Occipital | 4.5 |
| Hippo | | Ctx | |
| AD 1 Temporal Ctx | 25.0 | Control 2 Occipital | 58.2 |
| | | Ctx | |
| AD 2 Temporal Ctx | 39.2 | Control 3 Occipital | 18.2 |
| | | Ctx | |
| AD 3 Temporal Ctx | 7.7 | Control 4 Occipital | 7.3 |
| | | Ctx | |
| AD 4 Temporal Ctx | 0.2 | Control (Path) 1 | 92.7 |
| | | Occipital Ctx | |
| AD 5 Inf Temporal | 76.8 | Control (Path) 2 | 0.0 |
| Ctx | | Occipital Ctx | |
| AD 5 Sup Temporal | 40.6 | Control (Path) 3 | 3.4 |
| Ctx | | Occipital Ctx | |
| AD 6 Inf Temporal | 49.7 | Control (Path) 4 | 16.7 |
| Ctx | | Occipital Ctx | |
| AD 6 Sup Temporal | 57.4 | Control 1 Parietal Ctx | 7.1 |
| Ctx | | | |
| Control 1 Temporal | 9.2 | Control 2 Parietal Ctx | 41.8 |
| Ctx | | | |
| Control 2 Temporal | 40.9 | Control 3 Parietal Ctx | 0.0 |
| Ctx | | | |
| Control 3 Temporal | 20.6 | Control (Path) 1 | 97.9 |
| Ctx | | Parietal Ctx | |
| Control 3 Temporal | 10.7 | Control (Path) 2 | 29.5 |
| Ctx | | Parietal Ctx | |
| Control (Path) 1 | 97.3 | Control (Path) 3 | 4.4 |
| Temporal Ctx | | Parietal Ctx | |
| Control (Path) 2 | 52.9 | Control (Path) 4 | 68.3 |
| Temporal Ctx | | Parietal Ctx | |

[0761] TABLE 33
Panel 1.3D

| | Rel. Exp. (%) Ag2304, | | Rel. Exp. (%) Ag2304, |
|---|---|---|---|
| Tissue Name | Run 159131830 | Tissue Name | Run 159131830 |
| Liver adenocarcinoma | 6.0 | Kidney (fetal) | 8.5 |
| Pancreas | 1.7 | Renal ca. 786-0 | 7.6 |
| Pancreatic ca. CAPAN 2 | 2.4 | Renal ca. A498 | 13.2 |
| Adrenal gland | 14.9 | Renal ca. RXF 393 | 3.2 |
| Thyroid | 6.5 | Renal ca. ACHN | 3.1 |
| Salivary gland | 2.3 | Renal ca. UO-31 | 8.3 |
| Pituitary gland | 13.4 | Renal ca. TK-10 | 3.5 |
| Brain (fetal) | 7.7 | Liver | 2.8 |
| Brain (whole) | 13.5 | Liver (fetal) | 5.8 |
| Brain (amygdala) | 15.5 | Liver ca. (hepatoblast) | 7.3 |
| | | HepG2 | |
| Brain (cerebellum) | 4.6 | Lung | 19.9 |
| Brain (hippocampus) | 100.0 | Lung (fetal) | 9.9 |
| Brain (substantia nigra) | 2.8 | Lung ca. (small cell) | 5.4 |
| | | LX-1 | |
| Brain (thalamus) | 10.0 | Lung ca. (small cell) | 12.3 |
| | | NCI-H69 | |
| Cerebral Cortex | 25.0 | Lung ca. (s.cell var.) | 12.1 |
| | | SHP-77 | |
| Spinal cord | 4.0 | Lung ca. (large | 3.8 |
| | | cell)NCI-H460 | |
| glio/astro U87-MG | 21.9 | Lung ca. (non-sm. cell) | 5.9 |
| | | A549 | |
| glio/astro U-118-MG | 40.9 | Lung ca. (non-s.cell) | 13.6 |
| | | NCI-H23 | |
| astrocytoma SW1783 | 9.2 | Lung ca. (non-s.cell) | 7.0 |
| | | HOP-62 | |
| neuro*; met SK-N-AS | 65.5 | Lung ca. (non-s.cl) | 3.4 |
| | | NCI-H522 | |
| astrocytoma SF-539 | 9.8 | Lung ca. (squam.) SW | 6.6 |
| | | 900 | |
| astrocytoma SNB-75 | 11.9 | Lung ca. (squam.) | 1.7 |
| | | NCI-H596 | |
| glioma SNB-19 | 9.6 | Mammary gland | 18.4 |
| glioma U251 | 6.0 | Breast ca.* (pl.ef) | 6.3 |
| | | MCF-7 | |
| glioma SF-295 | 6.5 | Breast ca.* (pl.ef) | 34.6 |
| | | MDA-MB-231 | |
| Heart (Fetal) | 0.6 | Breast ca.* (pl.ef) | 5.1 |
| | | T47D | |
| Heart | 2.3 | Breast ca. BT-549 | 20.2 |
| Skeletal muscle (Fetal) | 11.4 | Breast ca. MDA-N | 5.7 |
| Skeletal muscle | 8.5 | Ovary | 5.6 |
| Bone marrow | 8.5 | Ovarian ca. OVCAR-3 | 7.7 |
| Thymus | 7.4 | Ovarian ca. OVCAR-4 | 0.7 |
| Spleen | 12.0 | Ovarian ca. OVCAR-5 | 16.7 |
| Lymph node | 6.3 | Ovarian ca. OVCAR-8 | 8.6 |
| Colorectal | 4.6 | Ovarian ca. IGROV-1 | 2.4 |
| Stomach | 8.5 | Ovarian ca. (ascites) | 15.5 |
| | | SK-OV-3 | |
| Small intestine | 9.2 | Uterus | 6.4 |
| Colon ca. SW480 | 8.0 | Placenta | 8.1 |
| Colon ca.* SW620 | 5.3 | Prostate | 3.4 |
| (SW480 met) | | | |
| Colon ca. HT29 | 2.6 | Prostate ca.* (bone | 5.9 |
| | | met) PC-3 | |
| Colon ca. HCT-116 | 7.4 | Testis | 18.6 |
| Colon ca. CaCo-2 | 7.4 | Melanoma Hs688(A).T | 4.5 |
| CC Well to Mod Diff | 9.2 | Melanoma* (met) | 2.5 |
| (ODO3866) | | Hs688(B).T | |
| Colon ca. HCC-2998 | 8.6 | Melanoma UACC-62 | 1.6 |
| Gastric ca. (liver met) | 30.8 | Melanoma M14 | 0.6 |
| NCI-N87 | | | |
| Bladder | 2.7 | Melanoma LOX IMVI | 4.0 |
| Trachea | 12.0 | Melanoma* (met) SK- | 2.3 |
| | | MEL-5 | |
| Kidney | 3.5 | Adipose | 7.5 |

[0762] TABLE 34
Panel 2D

| | Rel. Exp. (%) Ag2304, | | Rel. Exp. (%) Ag2304, |
|---|---|---|---|
| Tissue Name | Run 159134494 | Tissue Name | Run 159134494 |
| Normal Colon | 82.9 | Kidney Margin | 5.5 |
| | | 8120608 | |
| CC Well to Mod Diff | 21.3 | Kidney Cancer 8120613 | 17.9 |
| (ODO3866) | | | |
| CC Margin (ODO3866) | 14.6 | Kidney Margin | 13.1 |
| | | 8120614 | |
| CC Gr.2 rectosigmoid | 10.9 | Kidney Cancer 9010320 | 24.7 |
| (ODO3868) | | | |
| CC Margin (ODO3868) | 9.9 | Kidney Margin | 19.3 |
| | | 9010321 | |
| CC Mod Diff (ODO3920) | 21.5 | Normal Uterus | 17.6 |
| CC Margin (ODO3920) | 27.4 | Uterine Cancer 064011 | 52.5 |
| CC Gr.2 ascend colon | 45.1 | Normal Thyroid | 22.7 |
| (ODO3921) | | | |
| CC Margin (ODO3921) | 15.8 | Thyroid Cancer | 36.1 |
| CC from Partial | 37.9 | Thyroid Cancer | 18.2 |
| Hepatectomy (ODO4309) | | A302152 | |
| Mets | | | |
| Liver Margin (ODO4309) | 28.9 | Thyroid Margin | 30.1 |
| | | A302153 | |
| Colon mets to lung | 23.2 | Normal Breast | 49.7 |
| (OD04451-01) | | | |
| Lung Margin (OD04451-02) | 24.1 | Breast Cancer | 28.5 |
| Normal Prostate 6546-1 | 18.4 | Breast Cancer | 51.8 |
| | | (OD04590-01) | |
| Prostate Cancer (OD04410) | 59.9 | Breast Cancer Mets | 64.6 |
| | | (OD04590-03) | |
| Prostate Margin (OD04410) | 67.4 | Breast Cancer | 47.6 |
| | | Metastasis | |
| Prostate Cancer (OD04720- | 46.7 | Breast Cancer | 26.2 |
| 01) | | | |
| Prostate Margin (OD04720- | 93.3 | Breast Cancer | 28.9 |
| 02) | | | |
| Normal Lung | 100.0 | Breast Cancer 9100266 | 20.2 |
| Lung Met to Muscle | 41.2 | Breast Margin 9100265 | 16.7 |
| (ODO4286) | | | |
| Muscle Margin (ODO4286) | 47.6 | Breast Cancer A209073 | 38.2 |
| Lung Malignant Cancer | 31.9 | Breast Margin | 44.8 |
| (OD03126) | | A2090734 | |
| Lung Margin (OD03126) | 64.2 | Normal Liver | 23.2 |
| Lung Cancer (OD04404) | 58.6 | Liver Cancer | 23.3 |
| Lung Margin (OD04404) | 38.2 | Liver Cancer 1025 | 10.5 |
| Lung Cancer (OD04565) | 15.8 | Liver Cancer 1026 | 6.7 |
| Lung Margin (OD04565) | 26.4 | Liver Cancer 6004-T | 14.1 |
| Lung Cancer (OD04237-01) | 37.6 | Liver Tissue 6004-N | 9.5 |
| Lung Margin (OD04237-02) | 48.0 | Liver Cancer 6005-T | 6.7 |
| Ocular Mel Met to Liver | 14.9 | Liver Tissue 6005-N | 6.7 |
| (ODO4310) | | | |
| Liver Margin (ODO4310) | 13.5 | Normal Bladder | 49.0 |
| Melanoma Metastasis | 36.6 | Bladder Cancer | 5.7 |
| Lung Margin (OD04321) | 50.3 | Bladder Cancer | 32.5 |
| Normal Kidney | 84.7 | Bladder Cancer | 52.1 |
| | | (OD04718-01) | |
| Kidney Ca, Nuclear grade 2 | 65.1 | Bladder Normal | 63.7 |
| (OD04338) | | Adjacent (OD04718-03) | |
| Kidney Margin (OD04338) | 46.3 | Normal Ovary | 6.0 |
| Kidney Ca Nuclear grade | 33.4 | Ovarian Cancer | 63.3 |
| 1/2 (OD04339) | | | |
| Kidney Margin (OD04339) | 77.9 | Ovarian Cancer | 43.8 |
| | | (OD04768-07) | |
| Kidney Ca, Clear cell type | 71.7 | Ovary Margin | 14.6 |
| (OD04340) | | (OD04768-08) | |
| Kidney Margin (OD04340) | 57.0 | Normal Stomach | 30.4 |
| Kidney Ca, Nuclear grade 3 | 17.2 | Gastric Cancer 9060358 | 10.4 |
| (OD04348) | | | |
| Kidney Margin (OD04348) | 28.9 | Stomach Margin | 12.9 |
| | | 9060359 | |
| Kidney Cancer (OD04622- | 21.9 | Gastric Cancer 9060395 | 56.3 |
| 01) | | | |
| Kidney Margin (OD04622- | 4.3 | Stomach Margin | 30.4 |
| 03) | | 9060394 | |
| Kidney Cancer (OD04450- | 29.5 | Gastric Cancer 9060397 | 33.2 |
| 01) | | | |
| Kidney Margin (OD04450- | 36.9 | Stomach Margin | 8.9 |
| 03) | | 9060396 | |
| Kidney Cancer 8120607 | 3.4 | Gastric Cancer 064005 | 53.6 |

[0763] TABLE 35
Panel 4D

| | Rel. Exp. (%) | | Rel. Exp. (%) |
|---|---|---|---|
| | Ag2304, Run | | Ag2304, Run |
| Tissue Name | 159131012 | Tissue Name | 159131012 |
| Secondary Th1 act | 32.5 | HUVEC IL-1beta | 5.8 |
| Secondary Th2 act | 46.7 | HUVEC IFN gamma | 19.6 |
| Secondary Tr1 act | 47.0 | HUVEC TNF alpha + IFN | 12.2 |
| | | gamma | |
| Secondary Th1 rest | 14.5 | HUVEC TNF alpha + IL4 | 9.8 |
| Secondary Th2 rest | 27.0 | HUVEC IL-11 | 8.8 |
| Secondary Tr1 rest | 23.5 | Lung Microvascular EC none | 5.8 |
| Primary Th1 act | 44.1 | Lung Microvascular EC | 12.8 |
| | | TNF alpha + IL-1beta | |
| Primary Th2 act | 39.2 | Microvascular Dermal EC | 20.6 |
| | | none | |
| Primary Tr1 act | 49.3 | Microsvasular Dermal EC | 16.0 |
| | | TNF alpha + IL-1beta | |
| Primary Th1 rest | 95.3 | Bronchial epithelium | 14.2 |
| | | TNF alpha + IL1beta | |
| Primary Th2 rest | 54.7 | Small airway epithelium | 7.9 |
| | | none | |
| Primary Tr1 rest | 29.5 | Small airway epithelium | 38.4 |
| | | TNF alpha + IL-1beta | |
| CD45RA CD4 | 21.5 | Coronery artery SMC rest | 25.3 |
| lymphocyte act | | | |
| CD45RO CD4 | 37.1 | Coronery artery SMC | 12.7 |
| lymphocyte act | | TNF alpha + IL-1beta | |
| CD8 lymphocyte act | 20.9 | Astrocytes rest | 23.0 |
| Secondary CD8 | 29.1 | Astrocytes TNF alpha + IL- | 23.7 |
| lymphocyte rest | | 1beta | |
| Secondary CD8 | 22.7 | KU-812 (Basophil) rest | 4.6 |
| lymphocyte act | | | |
| CD4 lymphocyte none | 26.6 | KU-812 (Basophil) | 11.0 |
| | | PMA/ionomycin | |
| 2ry Th1/Th2/Tr1_anti- | 34.2 | CCD1106 (Keratinocytes) | 15.8 |
| CD95 CH11 | | none | |
| LAK cells rest | 41.5 | CCD1106 (Keratinocytes) | 5.1 |
| | | TNF alpha + IL-1beta | |
| LAK cells IL-2 | 33.2 | Liver cirrhosis | 2.8 |
| LAK cells IL-2 + IL-12 | 22.8 | Lupus kidney | 4.3 |
| LAK cells IL-2 + IFN | 36.9 | NCI-H292 none | 34.9 |
| gamma | | | |
| LAK cells IL-2 + IL-18 | 38.4 | NCI-H292 IL-4 | 38.4 |
| LAK cells | 34.2 | NCI-H292 IL-9 | 39.2 |
| PMA/ionomycin | | | |
| NK Cells IL-2 rest | 26.6 | NCI-H292 IL-13 | 21.2 |
| Two Way MLR 3 day | 53.2 | NCI-H292 IFN gamma | 20.9 |
| Two Way MLR 5 day | 26.2 | HPAEC none | 11.3 |
| Two Way MLR 7 day | 13.3 | HPAEC TNF alpha + IL- | 11.7 |
| | | 1beta | |
| PBMC rest | 14.5 | Lung fibroblast none | 18.9 |
| PBMC PWM | 83.5 | Lung fibroblast TNF alpha + | 22.8 |
| | | IL-1beta | |
| PBMC PHA-L | 31.9 | Lung fibroblast IL-4 | 25.9 |
| Ramos (B cell) none | 11.4 | Lung fibroblast IL-9 | 13.4 |
| Ramos (B cell) | 34.4 | Lung fibroblast IL-13 | 18.9 |
| ionomycin | | | |
| B lymphocytes PWM | 60.3 | Lung fibroblast IFN gamma | 46.0 |
| B lymphocytes CD40L | 16.6 | Dermal fibroblast CCD1070 | 47.0 |
| and IL-4 | | rest | |
| EOL-1 dbcAMP | 34.2 | Dermal fibroblast CCD1070 | 83.5 |
| | | TNF alpha | |
| EOL-1 dbcAMP | 100.0 | Dermal fibroblast CCD1070 | 23.7 |
| PMA/ionomycin | | IL-1beta | |
| Dendritic cells none | 13.7 | Dermal fibroblast IFN | 18.3 |
| | | gamma | |
| Dendritic cells LPS | 16.5 | Dermal fibroblast IL-4 | 25.2 |
| Dendritic cells anti- | 6.3 | IBD Colitis 2 | 2.3 |
| CD40 | | | |
| Monocytes rest | 23.5 | IBD Crohn's | 4.3 |
| Monocytes LPS | 84.1 | Colon | 24.5 |
| Macrophages rest | 23.3 | Lung | 23.7 |
| Macrophages LPS | 31.4 | Thymus | 39.0 |
| HUVEC none | 15.0 | Kidney | 44.4 |
| HUVEC starved | 30.6 | | |

[0764] CNS_neurodegeneration_v1.0 Summary: Ag2304 Expression of the NOV3 gene in this panel is ubiquitous. While this gene does not show differential expression between Alzheimer's diseased brains and control brains, this panel confirms the expression of this gene in the brains of an independent group of patients. See Panel 1.3d for utility of this gene in the central nervous system.

[0765] Panel 1.3D Summary: Ag2304 The NOV3 gene, a homolog of the Drosophila pecanex gene, is widely expressed across the samples in this panel, with highest expression in the hippocampus (CT=28.6). In addition, this gene is expressed at moderate to high levels in all CNS regions examined. Expression of this gene in both the mother and developing embryo is critical for normal CNS development. Furthermore, expression of this protein appears to be involved in stem cell fate determination, where removal of this protein increases neural precursor cells. Therefore, downregulation of this gene could be used in neural stem cell research and therapy to control the fate of stem cells and increasing the resulting numbers of post-mitotic neurons.

[0766] The NOV3 gene is modestly expressed in a wide variety of metabolic tissues including adipose, adrenal, pancreas, thyroid, pituitary, heart, adult and fetal skeletal muscle, and adult and fetal liver. This widespread expression in tissues with metabolic function suggests that the NOV3 gene product may be important for the pathogenesis, diagnosis, and/or treatment of metabolic disease in any or all of these tissues, including obesity and diabetes.

[0767] References:

[0768] 1. LaBonne S G, Furst A. Differentiation in vitro of neural precursor cells from normal and Pecanex mutant Drosophila embryos. J Neurogenet May 5, 1989; (2):99-104

[0769] Early gastrula embryos, lacking both maternally and zygotically expressed activity of the neurogenic pecanex locus, are shown to contain a greater than wild-type number of stably determined neural precursor cells which can differentiate into neurons in culture.

[0770] 2. LaBonne S G, Sunitha I, Mahowald A P. Molecular genetics of pecanex, a maternal- effect neurogenic locus of Drosophila melanogaster that potentially encodes a large transmembrane protein. Dev Biol November 1989; 136(1):1-16

[0771] In the absence of maternal expression of the pecanex gene, the embryo develops severe hyperneuralization similar to that characteristic of Notch mutant embryos. We have extended a previous molecular analysis of the chromosomal interval that encompasses pecanex by using additional deficiencies to localize the locus on the molecular map. RNA blot analysis shows that the locus encodes a rare 9-kb transcript as well as minor transcripts of 3.7 and 2.3 kb. The temporal expression of these transcripts is appropriate for a neurogenic locus. Phenocopies of the mutant phenotype have been produced following microinjection of antisense RNA corresponding to a portion of the pecanex transcripts. Conceptual translation of a partial coding sequence compiled from cDNA and genomic clones indicates that the pecanex locus potentially encodes a large, membrane-spanning protein.

[0772] Panel 2D Summary: Ag2304 The expression of this gene appears to be highest in a sample derived from normal lung tissue. Thus, the expression of this gene could be used to distinguish normal lung tissue from other tissues in the panel. Of note is the difference in expression between samples derived from ovarian cancer and normal adjacent tissue. This difference in levels of expression is also notable in samples derived from gastric cancer when compared to their normal counterparts. Thus, the expression of this gene could be used to distinguish ovarian or gastric cancer form their normal adjacent tissues. Moreover, therapeutic modulation of this gene, through the use of small molecule drugs, antibodies or protein therapeutics might be of use in the treatment of ovarian or gastric cancer.

[0773] Panel 4D Summary: Ag 2304 This NOV3 transcript is detected ubiquitously throughout this panel, with highest expression of this transcript in activated eosinophils (CT=28.1). This indicates an up-regulation of this transcript in these cells upon activation. Eosinophils contribute to the pathology of several atopic diseases such as asthma, atopic dermatitis, and rhinitis. Therefore, modulation of the activity or activation of the protein encoded by the NOV3 gene may be beneficial for the treatment of those diseases. The NOV3 gene is also highly expressed in effector T cells, activated monocytes and dermal fibroblasts upon treatment with TNF-a and IL-1b. Modulation of the expression of this transcript, which encodes for a Pecanex like molecule, could be beneficial in the treatment of inflammatory diseases associated with T cell activation as well as eosinophil activation including atopic diseases and autoimmune diseases such as rheumatoid arthritis, inflammatory bowel disease and skin inflammation.

[0774] NOV4

[0775] Expression of gene NOV4 was assessed using the primer-probe set Ag2428, described in Table 36. Results of the RTQ-PCR runs are shown in Tables 37, 38, 39 and 40.

TABLE 36

Probe Name Ag2428

| | | | Start | SEQ ID |
|---|---|---|---|---|
| Primers | Sequence | Length | Position | NO: |
| Forward | 5′-gagccagggctgctgtata-3′ | 19 | 1419 | 154 |
| Probe | TET-5′-cctctcaggaacatgctaccaaaatt-3′-TAMRA | 26 | 1439 | 155 |
| Reverse | 5′-tagattgagggcagcagtca-3′ | 20 | 1476 | 156 |

[0776] TABLE 37
CNS_neurodegeneration_v1.0

| | Rel. | | Rel. |
|---|---|---|---|
| | Exp. (%) | | Exp. (%) |
| | Ag2428, | | Ag2428, |
| | Run | | Run |
| Tissue Name | 206271177 | Tissue Name | 206271177 |
| AD 1 Hippo | 7.9 | Control (Path) 3 | 3.5 |
| | | Temporal Ctx | |
| AD 2 Hippo | 22.2 | Control (Path) 4 | 40.3 |
| | | Temporal Ctx | |
| AD 3 Hippo | 12.8 | AD 1 Occipital Ctx | 18.3 |
| AD 4 Hippo | 5.1 | AD 2 Occipital Ctx | 0.0 |
| | | (Missing) | |
| AD 5 Hippo | 100.0 | AD 3 Occipital Ctx | 7.0 |
| AD 6 Hippo | 32.5 | AD 4 Occipital Ctx | 20.3 |
| Control 2 Hippo | 10.9 | AD 5 Occipital Ctx | 25.0 |
| Control 4 Hippo | 17.0 | AD 5 Occipital Ctx | 16.5 |
| Control (Path) 3 | 6.7 | Control 1 Occipital | 6.0 |
| Hippo | | Ctx | |
| AD 1 Temporal Ctx | 16.6 | Control 2 Occipital | 21.0 |
| | | Ctx | |
| AD 2 Temporal Ctx | 23.2 | Control 3 Occipital | 23.2 |
| | | Ctx | |
| AD 3 Temporal Ctx | 9.4 | Control 4 Occipital | 6.0 |
| | | Ctx | |
| AD 4 Temporal Ctx | 25.9 | Control (Path) 1 | 50.3 |
| | | Occipital Ctx | |
| AD 5 Inf Temporal | 40.1 | Control (Path) 2 | 13.2 |
| Ctx | | Occipital Ctx | |
| AD 5 Sup Temporal | 33.7 | Control (Path) 3 | 1.1 |
| Ctx | | Occipital Ctx | |
| AD 6 Inf Temporal | 35.6 | Control (Path) 4 | 30.4 |
| Ctx | | Occipital Ctx | |
| AD 6 Sup Temporal | 48.3 | Control 1 Parietal Ctx | 12.4 |
| Ctx | | | |
| Control 1 Temporal | 8.0 | Control 2 Parietal Ctx | 46.0 |
| Ctx | | | |
| Control 2 Temporal | 8.5 | Control 3 Parietal Ctx | 23.7 |
| Ctx | | | |
| Control 3 Temporal | 14.7 | Control (Path) 1 | 38.7 |
| Ctx | | Parietal Ctx | |
| Control 3 Temporal | 11.3 | Control (Path) 2 | 20.4 |
| Ctx | | Parietal Ctx | |
| Control (Path) 1 | 37.6 | Control (Path) 3 | 5.4 |
| Temporal Ctx | | Parietal Ctx | |
| Control (Path) 2 | 34.9 | Control (path) 4 | 43.2 |
| Temporal Ctx | | Parietal Ctx | |

[0777] TABLE 38
Panel 1.3D

| | Rel. Exp. (%) | | Rel. Exp. (%) |
|---|---|---|---|
| | Ag2428, | | Ag2428, |
| Tissue Name | Run 159361380 | Tissue Name | Run 159361380 |
| Liver adenocarcinoma | 10.7 | Kidney (fetal) | 7.1 |
| Pancreas | 2.4 | Renal ca. 786-0 | 6.6 |
| Pancreatic ca. CAPAN 2 | 6.0 | Renal ca. A498 | 18.8 |
| Adrenal gland | 5.3 | Renal ca. RXF 393 | 3.8 |
| Thyroid | 2.5 | Renal ca. ACHN | 1.1 |
| Salivary gland | 3.7 | Renal ca. UO-31 | 4.5 |
| Pituitary gland | 7.2 | Renal ca. TK-10 | 5.1 |
| Brain (fetal) | 5.2 | Liver | 1.9 |
| Brain (whole) | 5.1 | Liver (fetal) | 11.4 |
| Brain (amygdala) | 5.1 | Liver ca. (hepatoblast) | 8.0 |
| | | HepG2 | |
| Brain (cerebellum) | 2.7 | Lung | 8.5 |
| Brain (hippocampus) | 17.6 | Lung (fetal) | 4.7 |
| Brain (substantia nigra) | 1.8 | Lung ca. (small cell) | 7.5 |
| | | LX-1 | |
| Brain (thalamus) | 4.9 | Lung ca. (small cell) | 11.9 |
| | | NCI-H69 | |
| Cerebral Cortex | 2.8 | Lung ca. (s. cell var.) | 25.2 |
| | | SHP-77 | |
| Spinal cord | 3.8 | Lung ca. (large | 8.8 |
| | | cell)NCI-H460 | |
| glio/astro U87-MG | 12.9 | Lung ca. (non-sm. cell) | 8.3 |
| | | A549 | |
| glio/astro U-118-MG | 39.5 | Lung ca. (non-s. cell) | 18.3 |
| | | NCI-H23 | |
| astrocytoma SW1783 | 5.4 | Lung ca. (non-s. cell) | 6.6 |
| | | HOP-62 | |
| neuro*; met SK-N-AS | 100.0 | Lung ca. (non-s. cl) | 8.4 |
| | | NCI-H522 | |
| astrocytoma SF-539 | 7.6 | Lung ca. (squam.) SW | 9.7 |
| | | 900 | |
| astrocytoma SNB-75 | 19.8 | Lung ca. (squam.) | 5.4 |
| | | NCI-H596 | |
| glioma SNB-19 | 12.0 | Mammary gland | 5.9 |
| glioma U251 | 11.3 | Breast ca.* (pl. ef) | 10.9 |
| | | MCF-7 | |
| glioma SF-295 | 7.4 | Breast ca.* (pl. ef) | 66.0 |
| | | MDA-MB-231 | |
| Heart (Fetal) | 2.0 | Breast ca.* (pl. ef) | 9.6 |
| | | T47D | |
| Heart | 5.1 | Breast ca. BT-549 | 34.4 |
| Skeletal muscle (Fetal) | 8.5 | Breast ca. MDA-N | 17.7 |
| Skeletal muscle | 1.2 | Ovary | 2.1 |
| Bone marrow | 17.8 | Ovarian ca. OVCAR-3 | 10.8 |
| Thymus | 5.6 | Ovarian ca. OVCAR-4 | 0.6 |
| Spleen | 10.1 | Ovarian ca. OVCAR-5 | 5.6 |
| Lymph node | 9.2 | Ovarian ca. OVCAR-8 | 10.0 |
| Colorectal | 6.9 | Ovarian ca. IGROV-1 | 2.1 |
| Stomach | 7.3 | Ovarian ca. (ascites) | 15.1 |
| | | SK-OV-3 | |
| Small intestine | 8.1 | Uterus | 3.7 |
| Colon ca. SW480 | 8.5 | Placenta | 3.8 |
| Colon ca.* SW620 | 13.6 | Prostate | 6.0 |
| (SW480 met) | | | |
| Colon ca. HT29 | 11.0 | Prostate ca.* (bone | 5.8 |
| | | met) PC-3 | |
| Colon ca. HCT-116 | 12.9 | Testis | 9.3 |
| Colon ca. CaCo-2 | 12.3 | Melanoma Hs688(A).T | 2.6 |
| CC Well to Mod Diff | 7.6 | Melanoma* (met) | 1.9 |
| (ODO3866) | | Hs688(B).T | |
| Colon ca. HCC-2998 | 33.0 | Melanoma UACC-62 | 3.8 |
| Gastric ca. (liver met) | 25.9 | Melanoma M14 | 5.8 |
| NCI-N87 | | | |
| Bladder | 10.2 | Melanoma LOX IMVI | 5.2 |
| Trachea | 9.0 | Melanoma* (met) SK- | 10.3 |
| | | MEL-5 | |
| Kidney | 2.5 | Adipose | 6.3 |

[0778] TABLE 39
Panel 2D

| | Rel. Exp. (%) | | Rel. Exp. (%) |
|---|---|---|---|
| | Ag2428, | | Ag2428, |
| Tissue Name | Run 159361727 | Tissue Name | Run 159361727 |
| Normal Colon | 80.1 | Kidney Margin | 2.1 |
| | | 8120608 | |
| CC Well to Mod Diff | 13.7 | Kidney Cancer 8120613 | 15.3 |
| (ODO3866) | | | |
| CC Margin (ODO3866) | 7.7 | Kidney Margin | 6.8 |
| | | 8120614 | |
| CC Gr.2 rectosigmoid | 25.5 | Kidney Cancer 9010320 | 21.3 |
| (ODO3868) | | | |
| CC Margin (ODO3868) | 6.6 | Kidney Margin | 17.4 |
| | | 9010321 | |
| CC Mod Diff (ODO3920) | 70.2 | Normal Uterus | 3.2 |
| CC Margin (ODO3920) | 30.4 | Uterine Cancer 064011 | 21.3 |
| CC Gr.2 ascend colon | 52.1 | Normal Thyroid | 9.9 |
| (ODO3921) | | | |
| CC Margin (ODO3921) | 11.1 | Thyroid Cancer | 5.8 |
| CC from Partial | 50.7 | Thyroid Cancer | 27.7 |
| Hepatectomy (ODO4309) | | A302152 | |
| Mets | | | |
| Liver Margin (ODO4309) | 22.7 | Thyroid Margin | 37.6 |
| | | A302153 | |
| Colon mets to lung | 29.1 | Normal Breast | 18.7 |
| (OD04451-01) | | | |
| Lung Margin (OD04451-02) | 7.0 | Breast Cancer | 26.4 |
| Normal Prostate 6546-1 | 8.8 | Breast Cancer | 75.3 |
| | | (OD04590-01) | |
| Prostate Cancer (OD04410) | 49.3 | Breast Cancer Mets | 87.1 |
| | | (OD04590-03) | |
| Prostate Margin (OD04410) | 41.2 | Breast Cancer | 48.0 |
| | | Metastasis | |
| Prostate Cancer (OD04720- | 52.9 | Breast Cancer | 49.7 |
| 01) | | | |
| Prostate Margin (OD04720- | 59.5 | Breast Cancer | 36.3 |
| 02) | | | |
| Normal Lung | 81.8 | Breast Cancer 9100266 | 18.4 |
| Lung Met to Muscle | 30.1 | Breast Margin 9100265 | 14.9 |
| (ODO4286) | | | |
| Muscle Margin (ODO4286) | 13.9 | Breast Cancer A209073 | 55.5 |
| Lung Malignant Cancer | 47.3 | Breast Margin | 45.1 |
| (OD03126) | | A2090734 | |
| Lung Margin (OD03126) | 41.8 | Normal Liver | 15.8 |
| Lung Cancer (OD04404) | 28.5 | Liver Cancer | 14.4 |
| Lung Margin (OD04404) | 16.7 | Liver Cancer 1025 | 5.7 |
| Lung Cancer (OD04565) | 28.3 | Liver Cancer 1026 | 5.7 |
| Lung Margin (OD04565) | 14.0 | Liver Cancer 6004-T | 7.9 |
| Lung Cancer (OD04237-01) | 62.4 | Liver Tissue 6004-N | 8.1 |
| Lung Margin (OD04237-02) | 28.3 | Liver Cancer 6005-T | 5.2 |
| Ocular Mel Met to Liver | 23.5 | Liver Tissue 6005-N | 0.8 |
| (ODO4310) | | | |
| Liver Margin (ODO4310) | 11.3 | Normal Bladder | 81.8 |
| Melanoma Metastasis | 40.9 | Bladder Cancer | 9.2 |
| Lung Margin (OD04321) | 26.2 | Bladder Cancer | 62.0 |
| Normal Kidney | 54.3 | Bladder Cancer | 32.8 |
| | | (OD04718-01) | |
| Kidney Ca, Nuclear grade 2 | 40.1 | Bladder Normal | 24.8 |
| (OD04338) | | Adjacent (OD04718-03) | |
| Kidney Margin (OD04338) | 45.7 | Normal Ovary | 0.8 |
| Kidney Ca Nuclear grade | 82.9 | Ovarian Cancer | 51.8 |
| 1/2 (OD04339) | | | |
| Kidney Margin (OD04339) | 45.4 | Ovarian Cancer | 86.5 |
| | | (OD04768-07) | |
| Kidney Ca, Clear cell type | 49.3 | Ovary Margin | 8.5 |
| (OD04340) | | (OD04768-08) | |
| Kidney Margin (OD04340) | 48.0 | Normal Stomach | 20.7 |
| Kidney Ca, Nuclear grade 3 | 24.3 | Gastric Cancer 9060358 | 6.9 |
| (OD04348) | | | |
| Kidney Margin (OD04348) | 40.3 | Stomach Margin | 13.1 |
| | | 9060359 | |
| Kidney Cancer (OD04622- | 10.7 | Gastric Cancer 9060395 | 23.5 |
| 01) | | | |
| Kidney Margin (OD04622- | 3.1 | Stomach Margin | 18.9 |
| 03) | | 9060394 | |
| Kidney Cancer (OD04450- | 24.8 | Gastric Cancer 9060397 | 39.8 |
| 01) | | | |
| Kidney Margin (OD04450- | 25.5 | Stomach Margin | 7.1 |
| 03) | | 9060396 | |
| Kidney Cancer 8120607 | 2.7 | Gastric Cancer 064005 | 100.0 |

[0779] TABLE 40
Panel 4D

| | Rel. Exp. (%) | | Rel. Exp. (%) |
|---|---|---|---|
| | Ag2428, Run | | Ag2428, Run |
| Tissue Name | 159362614 | Tissue Name | 159362614 |
| Secondary Th1 act | 26.8 | HUVEC IL-1beta | 9.2 |
| Secondary Th2 act | 34.6 | HUVEC IFN gamma | 14.1 |
| Secondary Tr1 act | 37.6 | HUVEC TNF alpha + IFN | 8.4 |
| | | gamma | |
| Secondary Th1 rest | 10.7 | HUVEC TNF alpha + IL4 | 12.0 |
| Secondary Th2 rest | 13.6 | HUVEC IL-11 | 7.9 |
| Secondary Tr1 rest | 16.7 | Lung Microvascular EC none | 10.9 |
| Primary Th1 act | 36.9 | Lung Microvascular EC | 9.9 |
| | | TNF alpha + IL-1beta | |
| Primary Th2 act | 48.3 | Microvascular Dermal EC | 17.0 |
| | | none | |
| Primary Tr1 act | 50.7 | Microsvasular Dermal EC | 10.6 |
| | | TNF alpha + IL-1beta | |
| Primary Th1 rest | 74.2 | Bronchial epithelium | 9.8 |
| | | TNF alpha + IL-1beta | |
| Primary Th2 rest | 41.5 | Small airway epithelium | 3.6 |
| | | none | |
| Primary Tr1 rest | 28.9 | Small airway epithelium | 38.7 |
| | | TNF alpha + IL-1beta | |
| CD45RA CD4 | 22.7 | Coronery artery SMC rest | 9.9 |
| lymphocyte act | | | |
| CD45RO CD4 | 31.0 | Coronery artery SMC | 4.2 |
| lymphocyte act | | TNF alpha + IL-1beta | |
| CD8 lymphocyte act | 15.9 | Astrocytes rest | 5.9 |
| Secondary CD8 | 19.6 | Astrocytes TNF alpha + IL- | 5.8 |
| lymphocyte rest | | 1beta | |
| Secondary CD8 | 17.9 | KU-812 (Basophil) rest | 8.7 |
| lymphocyte act | | | |
| CD4 lymphocyte none | 11.6 | KU-812 (Basophil) | 31.6 |
| | | PMA/ionomycin | |
| 2ry Th1/Th2/Tr1_anti- | 18.8 | CCD1106 (Keratinocytes) | 12.3 |
| CD95 CH11 | | none | |
| LAK cells rest | 20.4 | CCD1106 (Keratinocytes) | 8.4 |
| | | TNF alpha + IL-1beta | |
| LAK cells IL-2 | 27.7 | Liver cirrhosis | 4.7 |
| LAK cells IL-2 + IL-12 | 20.0 | Lupus kidney | 2.1 |
| LAK cells IL-2 + IFN | 38.4 | NCI-H292 none | 25.5 |
| gamma | | | |
| LAK cells IL-2 + IL-18 | 43.5 | NCI-H292 IL-4 | 37.1 |
| LAK cells | 13.6 | NCI-H292 IL-9 | 36.9 |
| PMA/ionomycin | | | |
| NK Cells IL-2 rest | 21.2 | NCI-H292 IL-13 | 15.6 |
| Two Way MLR 3 day | 23.8 | NCI-H292 IFN gamma | 14.1 |
| Two Way MLR 5 day | 11.3 | HPAEC none | 11.1 |
| Two Way MLR 7 day | 11.3 | HPAEC TNF alpha + IL- | 13.5 |
| | | 1beta | |
| PBMC rest | 7.9 | Lung fibroblast none | 10.7 |
| PBMC PWM | 60.3 | Lung fibroblast TNF alpha + | 5.0 |
| | | IL-1beta | |
| PBMC PHA-L | 23.5 | Lung fibroblast IL-4 | 18.6 |
| Ramos (B cell) none | 23.5 | Lung fibroblast IL-9 | 13.0 |
| Ramos (B cell) | 80.7 | Lung fibroblast IL-13 | 11.0 |
| ionomycin | | | |
| B lymphocytes PWM | 100.0 | Lung fibroblast IFN gamma | 13.6 |
| B lymphocytes CD40L | 44.8 | Dermal fibroblast CCD1070 | 27.9 |
| and IL-4 | | rest | |
| EOL-1 dbcAMP | 11.0 | Dermal fibroblast CCD1070 | 82.9 |
| | | TNF alpha | |
| EOL-1 dbcAMP | 19.6 | Dermal fibroblast CCD1070 | 15.0 |
| PMA/ionomycin | | IL-1beta | |
| Dendritic cells none | 9.5 | Dermal fibroblast IFN | 10.1 |
| | | gamma | |
| Dendritic cells LPS | 7.6 | Dermal fibroblast IL-4 | 11.9 |
| Dendritic cells anti- | 5.5 | IBD Colitis 2 | 2.8 |
| CD40 | | | |
| Monocytes rest | 15.8 | IBD Crohn's | 2.2 |
| Monocytes LPS | 11.0 | Colon | 11.0 |
| Macrophages rest | 9.3 | Lung | 5.3 |
| Macrophages LPS | 5.2 | Thymus | 18.6 |
| HUVEC none | 12.2 | Kidney | 41.8 |
| HUVEC starved | 33.0 | | |

[0780] CNS_neurodegeneration_v1.0 Summary: Ag2428 While results from this experiment show that this gene is not differentially expressed in the Alzheimer's diseased brain, this panel confirms the expression of this gene at moderate levels in the CNS in an independent group of patients. Please see Panel 1.3D for a discussion of utility of this gene in the central nervous system.

[0781] Panel 1.3D Summary: Ag2428 The NOV4 gene is expressed widely across many samples in this panel, with highest expression in a sample derived from a neuroblastoma cell line(CT=29.8). Moreover, there appears to be a cluster of expression associated with breast cancer cell lines. Thus, the expression of this gene could be used to distinguish these samples from others in the panel.

[0782] In addition, the NOV4 gene is moderately expressed in a number of metabolic tissues including adipose, adrenal, pituitary, heart, fetal skeletal muscle and fetal liver. Thus, this gene product may be an important small molecule target for the treatment of metabolic disease, including obesity and Type 2 diabetes.

[0783] This gene is expressed at low levels in the CNS, and is an an aurora-related kinase. The aurora-related kinases are involed in the control of the cell-cycle, and may be useful in the control of cell fate in neural stem cells. This protein may therefore be of use in stem cell research or therapy.

[0784] References:

[0785] Severson A F, Hamill D R, Carter J C, Schumacher J, Bowerman B. The aurora-related kinase AIR-2 recruits ZEN-4/CeMKLP1 to the mitotic spindle at metaphase and is required for cytokinesis. Curr Biol October 2000 5; 10(19):1162-71

[0786] BACKGROUND: The Aurora/Ipl1p-related kinase AIR-2 is required for mitotic chromosome segregation and cytokinesis in early Caenorhabditis elegans embryos. Previous studies have relied on non-conditional mutations or RNA-mediated interference (RNAi) to inactivate AIR-2. It has therefore not been possible to determine whether AIR-2 functions directly in cytokinesis or if the cleavage defect results indirectly from the failure to segregate DNA. One intriguing hypothesis is that AIR-2 acts to localize the mitotic kinesin-like protein ZEN-4 (also known as CeMKLP1), which later functions in cytokinesis. RESULTS: Using conditional alleles, we established that AIR-2 is required at metaphase or early anaphase for normal segregation of chromosomes, localization of ZEN-4, and cytokinesis. ZEN-4 is first required late in cytokinesis, and also functions to maintain cell separation through much of the subsequent interphase. DNA segregation defects alone were not sufficient to disrupt cytokinesis in other mutants, suggesting that AIR-2 acts specifically during cytokinesis through ZEN-4. AIR-2 and ZEN-4 shared similar genetic interactions with the formin homology (FH) protein CYK-1, suggesting that AIR-2 and ZEN-4 function in a single pathway, in parallel to a contractile ring pathway that includes CYK-1. Using in vitro co-immunoprecipitation experiments, we found that AIR-2 and ZEN-4 interact directly. CONCLUSIONS: AIR-2 has two functions during mitosis: one in chromosome segregation, and a second, independent function in cytokinesis through ZEN-4. AIR-2 and ZEN-4 may act in parallel to a second pathway that includes CYK-1.

[0787] Panel 2D Summary: Ag2428 The expression of this gene is found widely across a number of samples in this panel. It is found to be highest in a sample derived from a gastric cancer. Of note is the association observed between gastric cancer samples, when compared to their normal adjacent samples. This association is also notable in ovarian cancer and breast cancer. Thus, the expression of this gene could be used to distinguish gastric cancer, breast cancer and ovarian cancer from their normal adjacent tissues. Morover, therapeutic modulation of this gene, through the use of small molecule drugs, antibodies or protein therapeutics might be of benefit in the treatment of gastric, breast or ovarian cancer.

[0788] Panel 4D Summary: Ag 2428 This transcript is ubiquitously expressed in all cells throughout the panel. However, the highest expression of this transcript is found in B cells upon activation with the B cell mitogen, PWM. Significant expression of this transcript in the activated Ramos B cell line is consistent with this finding. This transcript encodes an aurora- related kinase 1 which belongs to a family of oncogenic mitogenic serine threonine kinases (see reference below). Therefore, modulation of the expression of this transcript by small molecules, may be beneficial for the treatment of diaseases associated with hyperproliferation of B cells including B cell lymphomas, hyperglobulinemia and autoimmune disease such as lupus and rheumatoid arthritis. This transcript is also expressed in dermal fibroblasts upon treatment with TNF-a and Il-1 and in primary Th1 cells suggesting that modulation of this transcript may be important in the treatment of T cell mediated diseases and inflammatory skin diseases.

[0789] Reference:

[0790] 1. J Cell Sci November 1999; 112 (Pt 21):3591-601. Aurora/Ipl1p-related kinases, a new oncogenic family of mitotic serine-threonine kinases. Giet R, Prigent C.

[0791] CNRS UPR41| Universite de Rennes I, Groupe Cycle Cellulaire, Faculte de Medecine, CS 34317, France.

[0792] During the past five years, a growing number of serine-threonine kinases highly homologous to the Saccharomyces cerevisiae Ipl1p kinase have been isolated in various organisms. A Drosophila melanogaster homologue, aurora, was the first to be isolated from a multicellular organism. Since then, several related kinases have been found in mammalian cells. They localise to the mitotic apparatus: in the centrosome, at the poles of the bipolar spindle or in the midbody. The kinases are necessary for completion of mitotic events such as centrosome separation, bipolar spindle assembly and chromosome segregation. Extensive research is now focusing on these proteins because the three human homologues are overexpressed in various primary cancers. Furthermore, overexpression of one of these kinases transforms cells. Because of the myriad of kinases identified, we suggest a generic name: Aurora/Ipl1p-related kinase (AIRK). We denote AIRKs with a species prefix and a number, e.g. HsAIRK1.

[0793] NOV5

[0794] Expression of gene NOV5 was assessed using the primer-probe set Ag2423, described in Table 41. Results of the RTQ-PCR runs are shown in Tables 42, 43 and 44.

TABLE 41

Probe Name Ag2423

| | | | Start | SEQ ID |
|---|---|---|---|---|
| Primers | Sequences | Length | Position | NO: |
| Forward | 5′-aactgccactggtgacactt-3′ | 20 | 243 | 157 |
| Probe | TET-5′-cacactcagtgtcggttaaaattactga-3′-TAMRA | 28 | 263 | 158 |
| Reverse | 5′-tgaattcttccaccatgagaa-3′ | 21 | 315 | 159 |

[0795] TABLE 42
Panel 1.3D

| | Rel. Exp. (%) | | Rel. Exp. (%) |
|---|---|---|---|
| | Ag2423, | | Ag2423, |
| Tissue Name | Run 159337657 | Tissue Name | Run 159337657 |
| Liver adenocarcinoma | 25.9 | Kidney (fetal) | 0.0 |
| Pancreas | 8.4 | Renal ca. 786-0 | 11.7 |
| Pancreatic ca. CAPAN 2 | 7.1 | Renal ca. A498 | 7.2 |
| Adrenal gland | 65.1 | Renal ca. RXF 393 | 9.6 |
| Thyroid | 4.0 | Renal ca. ACHN | 8.5 |
| Salivary gland | 41.8 | Renal ca. UO-31 | 8.4 |
| Pituitary gland | 9.9 | Renal ca. TK-10 | 4.5 |
| Brain (fetal) | 75.8 | Liver | 13.6 |
| Brain (whole) | 5.1 | Liver (fetal) | 28.1 |
| Brain (amygdala) | 5.8 | Liver ca. (hepatoblast) | 12.9 |
| | | HepG2 | |
| Brain (cerebellum) | 3.8 | Lung | 21.0 |
| Brain (hippocampus) | 66.4 | Lung (fetal) | 15.4 |
| Brain (substantia nigra) | 20.4 | Lung ca. (small cell) | 4.9 |
| | | LX-1 | |
| Brain (thalamus) | 7.4 | Lung ca. (small cell) | 4.6 |
| | | NCI-H69 | |
| Cerebral Cortex | 52.9 | Lung ca. (s. cell var.) | 14.7 |
| | | SHP-77 | |
| Spinal cord | 22.5 | Lung ca. (large | 15.7 |
| | | cell)NCI-H460 | |
| glio/astro U87-MG | 11.5 | Lung ca. (non-sm. cell) | 9.8 |
| | | A549 | |
| glio/astro U-118-MG | 11.1 | Lung ca. (non-s. cell) | 12.2 |
| | | NCI-H23 | |
| astrocytoma SW1783 | 15.8 | Lung ca. (non-s. cell) | 18.2 |
| | | HOP-62 | |
| neuro*; met SK-N-AS | 10.2 | Lung ca. (non-s. cl) | 10.7 |
| | | NCI-H522 | |
| astrocytoma SF-539 | 9.5 | Lung ca. (squam.) SW | 8.0 |
| | | 900 | |
| astrocytoma SNB-75 | 0.0 | Lung ca. (squam.) | 9.3 |
| | | NCI-H596 | |
| glioma SNB-19 | 16.6 | Mammary gland | 13.0 |
| glioma U251 | 5.2 | Breast ca.* (pl. ef) | 3.1 |
| | | MCF-7 | |
| glioma SF-295 | 0.0 | Breast ca.* (pl. ef) | 8.3 |
| | | MDA-MB-231 | |
| Heart (Fetal) | 24.1 | Breast ca.* (pl. ef) | 4.0 |
| | | T47D | |
| Heart | 33.0 | Breast ca. BT-549 | 6.1 |
| Skeletal muscle (Fetal) | 6.5 | Breast ca. MDA-N | 0.0 |
| Skeletal muscle | 10.8 | Ovary | 7.2 |
| Bone marrow | 5.7 | Ovarian ca. OVCAR-3 | 16.7 |
| Thymus | 0.0 | Ovarian ca. OVCAR-4 | 13.2 |
| Spleen | 33.0 | Ovarian ca. OVCAR-5 | 10.6 |
| Lymph node | 13.7 | Ovarian ca. OVCAR-8 | 0.0 |
| Colorectal | 28.5 | Ovarian ca. IGROV-1 | 9.3 |
| Stomach | 4.8 | Ovarian ca. (ascites) | 0.0 |
| | | SK-OV-3 | |
| Small intestine | 8.6 | Uterus | 0.0 |
| Colon ca. SW480 | 0.0 | Placenta | 8.0 |
| Colon ca.* SW620 | 4.4 | Prostate | 0.0 |
| (SW480 met) | | | |
| Colon ca. HT29 | 5.3 | Prostate ca.* (bone | 0.0 |
| | | met) PC-3 | |
| Colon ca. HCT-116 | 19.9 | Testis | 0.0 |
| Colon ca. CaCo-2 | 9.7 | Melanoma Hs688(A).T | 0.0 |
| CC Well to Mod Diff | 0.0 | Melanoma* (met) | 0.0 |
| (ODO3866) | | Hs688(B).T | |
| Colon ca. HCC-2998 | 0.0 | Melanoma UACC-62 | 6.6 |
| Gastric ca. (liver met) | 0.0 | Melanoma M14 | 5.1 |
| NCI-N87 | | | |
| Bladder | 100.0 | Melanoma LOX IMVI | 8.2 |
| Trachea | 4.4 | Melanoma* (met) SK- | 8.7 |
| | | MEL-5 | |
| Kidney | 25.7 | Adipose | 79.6 |

[0796] TABLE 43
Panel 2D

| | Rel. Exp. (%) | | Rel. Exp. (%) |
|---|---|---|---|
| | Ag2423, | | Ag2423, |
| Tissue Name | Run 159338041 | Tissue Name | Run 159338041 |
| Normal Colon | 34.6 | Kidney Margin | 0.0 |
| | | 8120608 | |
| CC Well to Mod Diff | 34.2 | Kidney Cancer 8120613 | 0.0 |
| (ODO3866) | | | |
| CC Margin (ODO3866) | 38.7 | Kidney Margin | 0.0 |
| | | 8120614 | |
| CC Gr.2 rectosigmoid | 9.1 | Kidney Cancer 9010320 | 0.0 |
| (ODO3868) | | | |
| CC Margin (ODO3868) | 11.0 | Kidney Margin | 0.0 |
| | | 9010321 | |
| CC Mod Diff (ODO3920) | 12.9 | Normal Uterus | 8.9 |
| CC Margin (ODO3920) | 17.7 | Uterine Cancer 064011 | 12.2 |
| CC Gr.2 ascend colon | 79.0 | Normal Thyroid | 2.6 |
| (ODO3921) | | | |
| CC Margin (ODO3921) | 17.1 | Thyroid Cancer | 5.6 |
| CC from Partial | 24.1 | Thyroid Cancer | 7.7 |
| Hepatectomy (ODO4309) | | A302152 | |
| Mets | | | |
| Liver Margin (ODO4309) | 17.8 | Thyroid Margin | 10.9 |
| | | A302153 | |
| Colon mets to lung | 2.0 | Normal Breast | 7.2 |
| (OD04451-01) | | | |
| Lung Margin (OD04451-02) | 8.0 | Breast Cancer | 2.4 |
| Normal Prostate 6546-1 | 2.8 | Breast Cancer | 16.0 |
| | | (OD04590-01) | |
| Prostate Cancer (OD04410) | 45.4 | Breast Cancer Mets | 19.5 |
| | | (OD04590-03) | |
| Prostate Margin (OD04410) | 27.4 | Breast Cancer | 11.2 |
| | | Metastasis | |
| Prostate Cancer (OD04720- | 9.8 | Breast Cancer | 10.9 |
| 01) | | | |
| Prostate Margin (OD04720- | 29.3 | Breast Cancer | 3.6 |
| 02) | | | |
| Normal Lung | 38.2 | Breast Cancer 9100266 | 12.9 |
| Lung Met to Muscle | 36.3 | Breast Margin 9100265 | 4.6 |
| (ODO4286) | | | |
| Muscle Margin (ODO4286) | 9.9 | Breast Cancer A209073 | 15.4 |
| Lung Malignant Cancer | 15.7 | Breast Margin | 6.1 |
| (OD03126) | | A2090734 | |
| Lung Margin (OD03126) | 12.0 | Normal Liver | 3.8 |
| Lung Cancer (OD04404) | 14.4 | Liver Cancer | 9.1 |
| Lung Margin (OD04404) | 10.1 | Liver Cancer 1025 | 3.8 |
| Lung Cancer (OD04565) | 7.4 | Liver Cancer 1026 | 2.7 |
| Lung Margin (OD04565) | 0.0 | Liver Cancer 6004-T | 3.2 |
| Lung Cancer (OD04237-01) | 43.8 | Liver Tissue 6004-N | 3.4 |
| Lung Margin (OD04237-02) | 12.9 | Liver Cancer 6005-T | 3.4 |
| Ocular Mel Met to Liver | 3.0 | Liver Tissue 6005-N | 1.6 |
| (ODO4310) | | | |
| Liver Margin (ODO4310) | 4.1 | Normal Bladder | 36.9 |
| Melanoma Metastasis | 33.2 | Bladder Cancer | 10.0 |
| Lung Margin (OD04321) | 23.7 | Bladder Cancer | 22.4 |
| Normal Kidney | 12.4 | Bladder Cancer | 100.0 |
| | | (OD04718-01) | |
| Kidney Ca, Nuclear grade 2 | 6.8 | Bladder Normal | 13.1 |
| (OD04338) | | Adjacent (OD04718-03) | |
| Kidney Margin (OD04338) | 6.2 | Normal Ovary | 3.0 |
| Kidney Ca Nuclear grade | 20.7 | Ovarian Cancer | 18.2 |
| 1/2 (OD04339) | | | |
| Kidney Margin (OD04339) | 11.8 | Ovarian Cancer | 47.6 |
| | | (OD04768-07) | |
| Kidney Ca, Clear cell type | 29.9 | Ovary Margin | 6.1 |
| (OD04340) | | (OD04768-08) | |
| Kidney Margin (OD04340) | 11.0 | Normal Stomach | 6.2 |
| Kidney Ca, Nuclear grade 3 | 5.8 | Gastric Cancer 9060358 | 0.0 |
| (OD04348) | | | |
| Kidney Margin (OD04348) | 9.8 | Stomach Margin | 42.3 |
| | | 9060359 | |
| Kidney Cancer (OD04622- | 0.0 | Gastric Cancer 9060395 | 37.4 |
| 01) | | | |
| Kidney Margin (OD04622- | 0.0 | Stomach Margin | 47.0 |
| 03) | | 9060394 | |
| Kidney Cancer (OD04450- | 7.5 | Gastric Cancer 9060397 | 76.3 |
| 01) | | | |
| Kidney Margin (OD04450- | 5.4 | Stomach Margin | 3.1 |
| 03) | | 9060396 | |
| Kidney Cancer 8120607 | 0.0 | Gastric Cancer 064005 | 35.6 |

[0797] TABLE 44
Panel 4D

| | Rel. Exp. (%) | | Rel. Exp. (%) |
|---|---|---|---|
| | Ag2423, Run | | Ag2423, Run |
| Tissue Name | 159338325 | Tissue Name | 159338325 |
| Secondary Th1 act | 2.1 | HUVEC IL-1beta | 1.9 |
| Secondary Th2 act | 4.8 | HUVEC IFN gamma | 0.0 |
| Secondary Tr1 act | 1.4 | HUVEC TNF alpha + IFN | 0.0 |
| | | gamma | |
| Secondary Th1 rest | 7.5 | HUVEC TNF alpha + IL4 | 0.0 |
| Secondary Th2 rest | 10.2 | HUVEC IL-11 | 0.0 |
| Secondary Tr1 rest | 2.0 | Lung Microvascular EC none | 4.7 |
| Primary Th1 act | 2.3 | Lung Microvascular EC | 3.5 |
| | | TNF alpha + IL-1beta | |
| Primary Th2 act | 100.0 | Microvascular Dermal EC | 8.0 |
| | | none | |
| Primary Tr1 act | 3.4 | Microsvasular Dermal EC | 15.3 |
| | | TNF alpha + IL-1beta | |
| Primary Th1 rest | 0.9 | Bronchial epithelium | 1.3 |
| | | TNF alpha + IL1beta | |
| Primary Th2 rest | 3.8 | Small airway epithelium | 3.6 |
| | | none | |
| Primary Tr1 rest | 1.4 | Small airway epithelium | 0.0 |
| | | TNF alpha + IL-1beta | |
| CD45RA CD4 | 1.6 | Coronery artery SMC rest | 0.0 |
| lymphocyte act | | | |
| CD45RO CD4 | 0.0 | Coronery artery SMC | 0.0 |
| lymphocyte act | | TNF alpha + IL-1beta | |
| CD8 lymphocyte act | 5.2 | Astrocytes rest | 5.1 |
| Secondary CD8 | 0.0 | Astrocytes TNF alpha + IL- | 0.0 |
| lymphocyte rest | | 1beta | |
| Secondary CD8 | 1.1 | KU-812 (Basophil) rest | 0.0 |
| lymphocyte act | | | |
| CD4 lymphocyte none | 2.2 | KU-812 (Basophil) | 2.1 |
| | | PMA/ionomycin | |
| 2ry Th1/Th2/Tr1_anti- | 1.5 | CCD1106 (Keratinocytes) | 1.5 |
| CD95 CH11 | | none | |
| LAK cells rest | 7.6 | CCD1106 (Keratinocytes) | 2.0 |
| | | TNF alpha + IL-1beta | |
| LAK cells IL-2 | 5.8 | Liver cirrhosis | 2.1 |
| LAK cells IL-2 + IL-12 | 1.4 | Lupus kidney | 4.8 |
| LAK cells IL-2 + IFN | 0.0 | NCI-H292 none | 1.6 |
| gamma | | | |
| LAK cells IL-2 + IL-18 | 1.7 | NCI-H292 IL-4 | 6.6 |
| LAK cells | 1.7 | NCI-H292 IL-9 | 0.0 |
| PMA/ionomycin | | | |
| NK Cells IL-2 rest | 0.9 | NCI-H292 IL-13 | 0.0 |
| Two Way MLR 3 day | 0.0 | NCI-H292 IFN gamma | 1.3 |
| Two Way MLR 5 day | 1.8 | HPAEC none | 0.0 |
| Two Way MLR 7 day | 8.5 | HPAEC TNF alpha + IL-1beta | 1.4 |
| PBMC rest | 1.8 | Lung fibroblast none | 0.9 |
| PBMC PWM | 1.8 | Lung fibroblast TNF alpha + | 6.0 |
| | | IL-1beta | |
| PBMC PHA-L | 3.7 | Lung fibroblast IL-4 | 6.3 |
| Ramos (B cell) none | 2.0 | Lung fibroblast IL-9 | 1.0 |
| Ramos (B cell) | 0.0 | Lung fibroblast IL-13 | 0.9 |
| ionomycin | | | |
| B lymphocytes PWM | 0.0 | Lung fibroblast IFN gamma | 0.8 |
| B lymphocytes CD40L | 0.0 | Dermal fibroblast CCD1070 | 2.2 |
| and IL-4 | | rest | |
| EOL-1 dbcAMP | 4.2 | Dermal fibroblast CCD1070 | 2.0 |
| | | TNF alpha | |
| EOL-1 dbcAMP | 0.0 | Dermal fibroblast CCD1070 | 0.0 |
| PMA/ionomycin | 0.0 | IL-1beta | |
| Dendritic cells none | 2.3 | Dermal fibroblast IFN | 0.0 |
| | | gamma | |
| Dendritic cells LPS | 4.3 | Dermal fibroblast IL-4 | 0.0 |
| Dendritic cells anti- | 0.0 | IBD Colitis 2 | 3.1 |
| CD40 | | | |
| Monocytes rest | 1.7 | IBD Crohn's | 1.8 |
| Monocytes LPS | 28.3 | Colon | 0.0 |
| Macrophages rest | 20.7 | Lung | 0.0 |
| Macrophages LPS | 1.1 | Thymus | 2.0 |
| HUVEC none | 2.0 | Kidney | 3.7 |
| HUVEC starved | 1.5 | | |

[0798] CNS_neurodegeneration_v1.0 Summary: Ag2423 Expression is low/undetected in all samples in this panel (CT>35). (Data not shown.)

[0799] Panel 1.3D Summary: Ag2423 This gene is expressed exclusively in a sample derived from bladder tissue. Thus, the expression of this gene could be used to distinguish bladder tissue from other tissues in the panel.

[0800] Panel 2D Summary: Ag2423 The expression of this gene is highest and almost exclusive to a sample derived from bladder cancer. This result is consistent with the expression detected in Panel 1.3D. Thus, the expression of this gene could be used to distinguish bladder cancer tissue from other tissues in the panel. Moreover, the therapeutic modulation of this gene, through the use of small molecule drugs, antibodies or protein therapeutics might be of benefit in the treatment of bladder cancer.

[0801] Panel 4D Summary: Ag2423 The expression of this gene is highest and almost exclusive to primary activated Th2 cells (CT 32.6). Very low expression of this transcript is found in activated LPS and macrophages (CT 34.9). This transcript encodes for a 26s proteasome like protein which is an essential component of the cellular protein degradation machinery. Some studies (reference 1) indicate a potential role for proteasomes in the regulation of signal transduction in T and B lymphocytes. This novel 26S proteasome may be involved in a more specific Th2 signalling pathway. Therefore, this gene product may be useful as a potential therapeutic target for attenuation of hyperactive Th2 response such as observed in allergic diseases (rhinitis, atopic skin diseases, asthma).

[0802] Reference:

[0803] Biochim Biophys Acta Jan. 6; 1999 1453(1):92-104 Proteasome participates in the alteration of signal transduction in T and B lymphocytes following trauma-hemorrhage. Samy T S, Schwacha M G, Chung C S, Cioffi W G, Bland K I, Chaudry I H.

[0804] Department of Surgery, Brown University School of Medicine, Providence, R.I., USA.

[0805] Proteasomes are essential components of the cellular protein degradation machinery. They are nonlysosomal and their participation is critical for (1) the removal of short lived proteins involved in metabolic regulation and cell proliferation, (2) the control of the activities of regulators involved in gene transcription, such as nuclear factor-kappa B (NF-kappa B) and signal transducer and activator of transcription (STAT1), and (3) processing of antigenic peptides for MHC class I presentation. Trauma-hemorrhage induces profound immunosuppression which is characterized by reduced splenocyte proliferation, interleukin (IL)-2 and interferon (IFN)-gamma productive capacity, increased activation of transcription factors NF-kappa B and STAT1in splenic T lymphocytes, reduced macrophage antigen presentation capacity and inordinate release of proinflammatory cytokines, such as IL-6 and tumor necrosis factor-alpha. Furthermore, it appears that the activity of several regulatory proteins involved in immune function is altered by trauma-hemorrhage. Since proteasomes are involved in regulation and removal of regulatory proteins, we hypothesized that trauma-hemorrhage alters proteasomal activity in splenic lymphocytes. The data showed that activities of 26s proteasome from CD3+CD4+ and CD3+CD8+ splenic T lymphocytes were enhanced following trauma-hemorrhage which was associated with increased expression of NF-kappa B and STAT1. On the other hand, trauma-hemorrhage attenuated the activity of 26s proteasome from splenic B lymphocytes which was restored upon IFN-gamma stimulation and correlated with increased expression of NF-kappa B. These studies indicate a potential role for proteasomes in the regulation of signal transduction in splenic T and B lymphocytes following trauma-hemorrhage, and also suggest them as potential therapeutic targets for attenuation of immune suppression associated with this form of injury.

[0806] NOV6

[0807] Expression of gene NOV6 was assessed using the primer-probe sets Ag1508, Ag1586, Ag2011 and Ag2284, described in Tables 45, 46, 47 and 48. Results of the RTQ-PCR runs are shown in Tables 49, 50, 51, 52, 53 and 54.

TABLE 45

Probe Name Ag1508

| | | | Start | SEQ ID |
|---|---|---|---|---|
| Primers | Sequences | Length | Position | NO: |
| Forward | 5′-atttggctatcccttcaggtt-3′ | 21 | 238 | 160 |
| Probe | TET-5′-cggatccaatatgagatgcccctct-3′-TAMRA | 25 | 263 | 161 |
| Reverse | 5′-gtcttggagctggactcttcat-3′ | 22 | 291 | 162 |

[0808] TABLE 46

Probe Name Ag1586

| | | | Start | SEQ ID |
|---|---|---|---|---|
| Primers | Sequences | Length | Position | NO: |
| Forward | 5′-accaggatgagtttgtgtcatc-3′ | 22 | 1583 | 163 |
| Probe | TET-5′-ctcaagatcccttcggacacgctgt-3′-TAMRA | 25 | 1609 | 164 |
| Reverse | 5′-tgcggaagctgtacacatagta-3′ | 22 | 1657 | 165 |

[0809] TABLE 47

uz,17/28 Probe Name Ag2011

| | | | Start | SEQ ID |
|---|---|---|---|---|
| Primers | Sequences | Length | Position | NO: |
| Forward | 5′-accaggatgagtttgtgtcatc-3′ | 22 | 1583 | 166 |
| Probe | TET-5′-ctcaagatcccttcggacacgctgt-3′-TAMRA | 25 | 1609 | 167 |
| Reverse | 5′-tgcggaagctgtacacatagta-3′ | 22 | 1657 | 168 |

[0810] TABLE 48

Probe Name Ag2284

| | | | | |
|---|---|---|---|---|
| | | | Start | SEQ ID |
| Primers | Sequences | Length | Position | NO: |

| | | | | |
|---|---|---|---|---|
| Forward | 5′-tagttatctacctgcgcttcca-3′ | 22 | 399 | 169 |
| Probe | TET-5′-cctacacagagaacaaacgcttcccg-3′-TAMRA | 26 | 426 | 170 |
| Reverse | 5′-gaaggtgaaggagacagtcaca-3′ | 22 | 466 | 171 |

[0811] TABLE 49
Panel 1.2

| | Rel. Exp. (%) | | Rel. Exp. (%) |
|---|---|---|---|
| | Ag1508, | | Ag1508, |
| Tissue Name | Run 141937122 | Tissue Name | Run 141937122 |
| Endothelial cells | 0.0 | Renal ca. 786-0 | 0.0 |
| Heart (Fetal) | 0.9 | Renal ca. A498 | 0.0 |
| Pancreas | 0.1 | Renal ca. RXF 393 | 0.0 |
| Pancreatic ca. CAPAN 2 | 0.0 | Renal ca. ACHN | 0.0 |
| Adrenal Gland | 2.7 | Renal ca. UO-31 | 0.0 |
| Thyroid | 0.1 | Renal ca. TK-10 | 0.0 |
| Salivary gland | 0.9 | Liver | 0.3 |
| Pituitary gland | 0.0 | Liver (fetal) | 0.1 |
| Brain (fetal) | 0.0 | Liver ca. (hepatoblast) | 0.0 |
| | | HepG2 | |
| Brain (whole) | 0.0 | Lung | 0.0 |
| Brain (amygdala) | 0.0 | Lung (fetal) | 0.0 |
| Brain (cerebellum) | 0.1 | Lung ca. (small cell) | 0.0 |
| | | LX-1 | |
| Brain (hippocampus) | 0.1 | Lung ca. (small cell) | 0.0 |
| | | NCI-H69 | |
| Brain (thalamus) | 0.0 | Lung ca. (s. cell var.) | 0.0 |
| | | SHP-77 | |
| Cerebral Cortex | 0.3 | Lung ca. (large | 0.0 |
| | | cell)NCI-H460 | |
| Spinal cord | 0.0 | Lung ca. (non-sm. cell) | 0.0 |
| | | A549 | |
| glio/astro U87-MG | 0.0 | Lung ca. (non-s. cell) | 0.0 |
| | | NCI-H23 | |
| glio/astro U-118-MG | 0.1 | Lung ca. (non-s. cell) | 0.0 |
| | | HOP-62 | |
| astrocytoma SW1783 | 0.0 | Lung ca. (non-s. cl) | 9.4 |
| | | NCI-H522 | |
| neuro*; met SK-N-AS | 0.0 | Lung ca. (squam.) SW | 0.2 |
| | | 900 | |
| astrocytoma SF-539 | 0.0 | Lung ca. (squam.) | 0.0 |
| | | NCI-H596 | |
| astrocytoma SNB-75 | 0.0 | Mammary gland | 0.0 |
| glioma SNB-19 | 0.0 | Breast ca.* (pl. ef) | 0.0 |
| | | MCF-7 | |
| glioma U251 | 0.0 | Breast ca.* (pl. ef) | 0.0 |
| | | MDA-MB-231 | |
| glioma SF-295 | 0.0 | Breast ca.* (pl. ef) | 0.0 |
| | | T47D | |
| Heart | 10.7 | Breast ca. BT-549 | 0.0 |
| Skeletal Muscle | 100.0 | Breast ca. MDA-N | 0.0 |
| Bone marrow | 0.1 | Ovary | 0.5 |
| Thymus | 0.0 | Ovarian ca. OVCAR-3 | 0.0 |
| Spleen | 0.0 | Ovarian ca. OVCAR-4 | 0.0 |
| Lymph node | 0.0 | Ovarian ca. OVCAR-5 | 0.0 |
| Colorectal | 0.0 | Ovarian ca. OVCAR-8 | 0.0 |
| Stomach | 0.1 | Ovarian ca. IGROV-1 | 0.0 |
| Small intestine | 0.2 | Ovarian ca. (ascites) | 0.0 |
| | | SK-OV-3 | |
| Colon ca. SW480 | 0.0 | Uterus | 0.2 |
| Colon ca.* SW620 | 0.0 | Placenta | 0.0 |
| (SW480 met) | | | |
| Colon ca. HT29 | 0.0 | Prostate | 0.4 |
| Colon ca. HCT-116 | 0.1 | Prostate ca.* (bone | 0.0 |
| | | met) PC-3 | |
| Colon ca. CaCo-2 | 0.0 | Testis | 0.2 |
| CC Well to Mod Diff | 0.0 | Melanoma Hs688(A).T | 0.0 |
| (ODO3866) | | | |
| Colon ca. HCC-2998 | 0.0 | Melanoma* (met) | 0.0 |
| | | Hs688(B).T | |
| Gastric ca. (liver met) | 0.0 | Melanoma UACC-62 | 0.1 |
| NCI-N87 | | | |
| Bladder | 0.2 | Melanoma M14 | 0.0 |
| Trachea | 0.0 | Melanoma LOX IMVI | 0.0 |
| Kidney | 8.9 | Melanoma* (met) SK- | 0.0 |
| | | MEL-5 | |
| Kidney (fetal) | 0.6 | | |

[0812] TABLE 50
Panel 1.3D

| | Rel. | Rel. | Rel. | | Rel. | Rel. | Rel. |
|---|---|---|---|---|---|---|---|
| | Exp. (%) | Exp. (%) | Exp. (%) | | Exp. (%) | Exp. (%) | Exp. (%) |
| | Ag1586, | Ag2011, | Ag2284, | | Ag1586, | Ag2011, | Ag2284, |
| | Run | Run | Run | Tissue | Run | Run | Run |
| Tissue Name | 146473155 | 147816085 | 167985231 | Name | 146473155 | 147816085 | 167985231 |
| Liver | 29.9 | 37.6 | 0.2 | Kidney | 3.8 | 3.7 | 1.6 |
| adenocarcinoma | | | | (fetal) | | | |
| Pancreas | 1.7 | 0.7 | 0.3 | Renal ca. | 6.1 | 11.7 | 0.0 |
| | | | | 786-0 | | | |
| Pancreatic ca. | 6.3 | 9.6 | 0.0 | Renal ca. | 25.0 | 25.9 | 0.0 |
| CAPAN 2 | | | | A498 | | | |
| Adrenal gland | 2.6 | 2.5 | 0.5 | Renal ca. | 4.5 | 5.0 | 0.0 |
| | | | | RXF 393 | | | |
| Thyroid | 2.5 | 1.8 | 1.2 | Renal ca. | 8.8 | 11.3 | 0.0 |
| | | | | ACHN | | | |
| Salivary gland | 1.9 | 2.2 | 0.4 | Renal ca. | 15.0 | 15.0 | 0.0 |
| | | | | UO-31 | | | |
| Pituitary gland | 0.9 | 1.5 | 0.1 | Renal ca. | 4.4 | 4.6 | 0.0 |
| | | | | TK-10 | | | |
| Brain (fetal) | 12.2 | 13.1 | 0.0 | Liver | 0.2 | 0.1 | 0.4 |
| Brain (whole) | 9.7 | 10.7 | 0.2 | Liver (fetal) | 0.7 | 0.8 | 0.1 |
| Brain | 9.5 | 9.9 | 0.2 | Liver ca. | 16.8 | 12.8 | 0.1 |
| (amygdala) | | | | (hepatoblast) | | | |
| | | | | HepG2 | | | |
| Brain | 3.3 | 2.3 | 0.1 | Lung | 5.0 | 5.1 | 0.0 |
| (cerebellum) | | | | | | | |
| Brain | 24.7 | 21.0 | 0.1 | Lung (fetal) | 7.4 | 8.1 | 0.1 |
| (hippocampus) | | | | | | | |
| Brain | 0.9 | 1.3 | 0.1 | Lung ca. | 16.8 | 12.1 | 0.0 |
| (substantia | | | | (small cell) | | | |
| nigra) | | | | LX-1 | | | |
| Brain | 4.7 | 3.7 | 0.1 | Lung ca. | 18.4 | 23.7 | 0.0 |
| (thalamus) | | | | (small cell) | | | |
| | | | | NCI-H69 | | | |
| Cerebral Cortex | 75.8 | 71.2 | 0.2 | Lung ca. | 8.5 | 7.2 | 0.0 |
| | | | | (s.cell var.) | | | |
| | | | | SHP-77 | | | |
| Spinal cord | 2.0 | 2.4 | 0.1 | Lung ca. | 10.7 | 10.1 | 0.0 |
| | | | | (large | | | |
| | | | | cell)NCI- | | | |
| | | | | H460 | | | |
| glio/astro U87- | 15.3 | 17.9 | 0.0 | Lung ca. | 3.2 | 4.1 | 0.0 |
| MG | | | | (non-sm. | | | |
| | | | | cell) A549 | | | |
| glio/astro U- | 38.2 | 41.2 | 0.2 | Lung ca. | 23.2 | 24.7 | 0.5 |
| 118-MG | | | | (non-s.cell) | | | |
| | | | | NCI-H23 | | | |
| astrocytoma | 8.3 | 10.4 | 0.1 | Lung ca. | 18.9 | 15.7 | 0.0 |
| SW1783 | | | | (non-s.cell) | | | |
| | | | | HOP-62 | | | |
| neuro*; met | 23.5 | 24.3 | 0.0 | Lung ca. | 5.6 | 7.5 | 8.1 |
| SK-N-AS | | | | (non-s.cl) | | | |
| | | | | NCI-H522 | | | |
| astrocytoma SF- | 19.6 | 38.4 | 0.0 | Lung ca. | 13.0 | 13.1 | 0.2 |
| 539 | | | | (squam.) SW | | | |
| | | | | 900 | | | |
| astrocytoma | 44.4 | 45.1 | 0.1 | Lung ca. | 6.5 | 5.7 | 0.0 |
| SNB-75 | | | | (squam.) | | | |
| | | | | NCI-H596 | | | |
| glioma SNB-19 | 26.2 | 12.2 | 0.0 | Mammary | 11.5 | 9.3 | 0.2 |
| | | | | gland | | | |
| glioma U251 | 16.4 | 16.2 | 0.1 | Breast ca.* | 14.1 | 14.4 | 0.0 |
| | | | | (pl.ef) | | | |
| | | | | MCF-7 | | | |
| glioma SF-295 | 26.4 | 36.9 | 0.0 | Breast ca.* | 82.9 | 87.1 | 0.0 |
| | | | | (pl.ef) | | | |
| | | | | MDA-MB- | | | |
| | | | | 231 | | | |
| Heart (Fetal) | 80.7 | 95.3 | 1.8 | Breast ca.* | 6.1 | 4.6 | 0.1 |
| | | | | (pl. ef) | | | |
| | | | | T47D | | | |
| Heart | 2.8 | 1.9 | 2.3 | Breast ca. | 13.6 | 11.2 | 0.2 |
| | | | | BT-549 | | | |
| Skeletal muscle | 85.3 | 87.7 | 100.0 | Breast ca. | 28.1 | 31.6 | 0.0 |
| (Fetal) | | | | MDA-N | | | |
| Skeletal muscle | 2.1 | 2.4 | 88.3 | Ovary | 20.9 | 19.5 | 0.8 |
| Bone marrow | 0.6 | 0.3 | 0.2 | Ovarian ca. | 33.0 | 40.1 | 0.0 |
| | | | | OVCAR-3 | | | |
| Thymus | 2.6 | 2.3 | 0.0 | Ovarian ca. | 5.5 | 5.4 | 0.0 |
| | | | | OVCAR-4 | | | |
| Spleen | 2.9 | 2.6 | 0.0 | Ovarian ca. | 10.9 | 13.1 | 0.1 |
| | | | | OVCAR-5 | | | |
| Lymph node | 5.1 | 5.2 | 0.1 | Ovarian ca. | 17.4 | 18.3 | 0.1 |
| | | | | OVCAR-8 | | | |
| Colorectal | 5.2 | 3.9 | 0.0 | Ovarian ca. | 4.5 | 5.3 | 0.0 |
| | | | | IGROV-1 | | | |
| Stomach | 3.7 | 5.6 | 0.2 | Ovarian ca. | 25.7 | 22.4 | 0.1 |
| | | | | (ascites) SK- | | | |
| | | | | OV-3 | | | |
| Small intestine | 1.6 | 1.3 | 0.2 | Uterus | 2.7 | 2.4 | 1.0 |
| Colon ca. | 45.4 | 55.5 | 0.1 | Placenta | 6.7 | 10.2 | 0.2 |
| SW480 | | | | | | | |
| Colon ca.* | 11.3 | 11.1 | 0.0 | Prostate | 0.4 | 1.4 | 0.2 |
| SW620 (SW480 | | | | | | | |
| met) | | | | | | | |
| Colon ca. HT29 | 13.3 | 13.3 | 0.0 | Prostate ca.* | 8.4 | 11.3 | 0.0 |
| | | | | (bone met) | | | |
| | | | | PC-3 | | | |
| Colon ca. HCT- | 10.5 | 10.5 | 0.2 | Testis | 8.1 | 8.5 | 1.1 |
| 116 | | | | | | | |
| Colon ca. | 24.0 | 23.0 | 0.1 | Melanoma | 59.0 | 86.5 | 0.0 |
| CaCo-2 | | | | Hs688(A).T | | | |
| CC Well to | 19.1 | 16.6 | 0.1 | Melanoma* | 100.0 | 100.0 | 0.0 |
| Mod Diff | | | | (met) | | | |
| (ODO3866) | | | | Hs688(B).T | | | |
| Colon ca. HCC- | 25.7 | 20.3 | 0.0 | Melanoma | 17.6 | 19.5 | 0.1 |
| 2998 | | | | UACC-62 | | | |
| Gastric ca. | 59.9 | 62.9 | 0.1 | Melanoma | 16.3 | 21.9 | 0.0 |
| (liver met) NCI- | | | | M14 | | | |
| N87 | | | | | | | |
| Bladder | 1.8 | 4.6 | 0.2 | Melanoma | 3.6 | 5.8 | 0.0 |
| | | | | LOX IMVI | | | |
| Trachea | 6.9 | 5.6 | 0.1 | Melanoma* | 12.9 | 22.1 | 0.0 |
| | | | | (met) SK- | | | |
| | | | | MEL-5 | | | |
| Kidney | 0.8 | 0.7 | 2.8 | Adipose | 5.6 | 4.5 | 0.7 |

[0813] TABLE 51
Panel 2.2

| | Rel. Exp. (%) | | Rel. Exp. (%) |
|---|---|---|---|
| | Ag2011, | | Ag2011, |
| Tissue Name | Run 174154748 | Tissue Name | Run 174154748 |
| Normal Colon | 24.7 | Kidney Margin | 68.3 |
| | | (OD04348) | |
| Colon cancer (OD06064) | 48.6 | Kidney malignant cancer | 25.0 |
| | | (OD06204B) | |
| Colon Margin (OD06064) | 4.9 | Kidney normal adjacent | 7.4 |
| | | tissue (OD06204E) | |
| Colon cancer (OD06159) | 9.3 | Kidney Cancer | 34.4 |
| | | (OD04450-01) | |
| Colon Margin (OD06159) | 19.5 | Kidney Margin | 18.4 |
| | | (OD04450-03) | |
| Colon cancer (OD06297- | 11.7 | Kidney Cancer 8120613 | 9.7 |
| 04) | | | |
| Colon Margin (OD06297- | 12.5 | Kidney Margin 8120614 | 18.8 |
| 015) | | | |
| CC Gr.2 ascend colon | 17.3 | Kidney Cancer 9010320 | 16.2 |
| (ODO3921) | | | |
| CC Margin (ODO3921) | 14.2 | Kidney Margin 9010321 | 13.8 |
| Colon cancer metastasis | 8.6 | Kidney Cancer 8120607 | 37.1 |
| (OD06104) | | | |
| Lung Margin (OD06104) | 8.3 | Kidney Margin 8120608 | 7.0 |
| Colon mets to lung | 23.0 | Normal Uterus | 21.9 |
| (OD04451-01) | | | |
| Lung Margin (OD04451- | 32.8 | Uterine Cancer 064011 | 13.7 |
| 02) | | | |
| Normal Prostate | 4.8 | Normal Thyroid | 2.4 |
| Prostate Cancer | 4.9 | Thyroid Cancer | 8.1 |
| (OD04410) | | | |
| Prostate Margin | 8.8 | Thyroid Cancer A302152 | 35.4 |
| (OD04410) | | | |
| Normal Ovary | 32.3 | Thyroid Margin A302153 | 8.7 |
| Ovarian cancer | 32.1 | Normal Breast | 29.7 |
| (OD06283-03) | | | |
| Ovarian Margin | 13.8 | Breast Cancer | 11.9 |
| (OD06283-07) | | | |
| Ovarian Cancer | 19.9 | Breast Cancer | 47.6 |
| Ovarian cancer | 9.2 | Breast Cancer (OD04590- | 25.5 |
| (OD06145) | | 01) | |
| Ovarian Margin | 8.6 | Breast Cancer Mets | 38.4 |
| (OD06145) | | (OD04590-03) | |
| Ovarian cancer | 13.0 | Breast Cancer Metastasis | 30.1 |
| (OD06455-03) | | | |
| Ovarian Margin | 2.1 | Breast Cancer | 41.5 |
| (OD06455-07) | | | |
| Normal Lung | 27.2 | Breast Cancer 9100266 | 9.2 |
| Invasive poor diff. lung | 28.5 | Breast Margin 9100265 | 18.2 |
| adeno (ODO4945-01 | | | |
| Lung Margin (ODO4945- | 15.0 | Breast Cancer A209073 | 14.9 |
| 03) | | | |
| Lung Malignant Cancer | 30.4 | Breast Margin A2090734 | 37.6 |
| (OD03126) | | | |
| Lung Margin (OD03126) | 15.9 | Breast cancer (OD06083) | 55.9 |
| Lung Cancer (OD05014A) | 39.5 | Breast cancer node | 48.6 |
| | | metastasis (OD06083) | |
| Lung Margin (OD05014B) | 22.1 | Normal Liver | 10.4 |
| Lung cancer (OD06081) | 23.7 | Liver Cancer 1026 | 9.1 |
| Lung Margin (OD06081) | 16.8 | Liver Cancer 1025 | 20.7 |
| Lung Cancer (OD04237- | 9.0 | Liver Cancer 6004-T | 12.2 |
| 01) | | | |
| Lung Margin (OD04237- | 41.5 | Liver Tissue 6004-N | 8.0 |
| 02) | | | |
| Ocular Mel Met to Liver | 100.0 | Liver Cancer 6005-T | 36.6 |
| (ODO4310) | | | |
| Liver Margin (ODO4310) | 4.2 | Liver Tissue 6005-N | 25.0 |
| Melanoma Metastasis | 47.0 | Liver Cancer | 4.5 |
| Lung Margin (OD04321) | 28.1 | Normal Bladder | 18.7 |
| Normal Kidney | 12.3 | Bladder Cancer | 17.2 |
| Kidney Ca, Nuclear grade | 18.3 | Bladder Cancer | 72.7 |
| 2 (OD04338) | | | |
| Kidney Margin | 18.0 | Normal Stomach | 33.4 |
| (OD04338) | | | |
| Kidney Ca Nuclear grade | 83.5 | Gastric Cancer 9060397 | 9.6 |
| 1/2 (OD04339) | | | |
| Kidney Margin | 10.4 | Stomach Margin 9060396 | 10.4 |
| (OD04339) | | | |
| Kidney Ca, Clear cell type | 22.2 | Gastric Cancer 9060395 | 7.6 |
| (OD04340) | | | |
| Kidney Margin | 12.7 | Stomach Margin 9060394 | 19.6 |
| (OD04340) | | | |
| Kidney Ca, Nuclear grade | 15.7 | Gastric Cancer 064005 | 17.4 |
| 3 (OD04348) | | | |

[0814] TABLE 52
Panel 2D

| | Rel. Exp. (%) | Rel. Exp. (%) | | Rel. Exp. (%) | Rel. Exp. (%) |
|---|---|---|---|---|---|
| | Ag1508, Run | Ag1586, Run | | Ag1508, Run | Ag1586, Run |
| Tissue Name | 144982575 | 162624476 | Tissue Name | 144982575 | 162624476 |
| Normal Colon | 2.2 | 34.9 | Kidney Margin | 11.3 | 14.2 |
| | | | 8120608 | | |
| CC Well to Mod | 0.1 | 28.3 | Kidney Cancer | 3.6 | 30.4 |
| Diff (ODO3866) | | | 8120613 | | |
| CC Margin | 1.4 | 9.2 | Kidney Margin | 11.0 | 17.7 |
| (ODO3866) | | | 8120614 | | |
| CC Gr.2 | 0.1 | 25.9 | Kidney Cancer | 0.7 | 57.0 |
| rectosigmoid | | | 9010320 | | |
| (ODO3868) | | | | | |
| CC Margin | 0.6 | 4.7 | Kidney Margin | 12.0 | 40.9 |
| (ODO3868) | | | 9010321 | | |
| CC Mod Diff | 0.1 | 55.5 | Normal Uterus | 2.8 | 10.4 |
| (ODO3920) | | | | | |
| CC Margin | 1.1 | 14.2 | Uterine Cancer | 0.6 | 28.9 |
| (ODO3920) | | | 064011 | | |
| CC Gr.2 ascend | 0.1 | 62.9 | Normal Thyroid | 15.1 | 8.4 |
| colon (ODO3921) | | | | | |
| CC Margin | 0.6 | 12.1 | Thyroid Cancer | 7.1 | 16.7 |
| (ODO3921) | | | | | |
| CC from Partial | 0.3 | 41.5 | Thyroid Cancer | 0.9 | 24.7 |
| Hepatectomy | | | A302152 | | |
| (ODO4309) Mets | | | | | |
| Liver Margin | 2.4 | 13.6 | Thyroid Margin | 3.1 | 17.7 |
| (ODO4309) | | | A302153 | | |
| Colon mets to lung | 0.2 | 18.0 | Normal Breast | 0.3 | 60.3 |
| (OD04451-01) | | | | | |
| Lung Margin | 0.4 | 25.5 | Breast Cancer | 0.0 | 24.1 |
| (OD04451-02) | | | | | |
| Normal Prostate | 3.3 | 17.0 | Breast Cancer | 0.2 | 47.0 |
| 6546-1 | | | (OD04590-01) | | |
| Prostate Cancer | 3.4 | 33.7 | Breast Cancer | 0.7 | 72.7 |
| (OD04410) | | | Mets | | |
| | | | (OD04590-03) | | |
| Prostate Margin | 0.5 | 28.9 | Breast Cancer | 0.0 | 37.4 |
| (OD04410) | | | Metastasis | | |
| Prostate Cancer | 0.3 | 33.7 | Breast Cancer | 0.2 | 36.9 |
| (OD04720-01) | | | | | |
| Prostate Margin | 2.6 | 45.7 | Breast Cancer | 0.1 | 65.1 |
| (OD04720-02) | | | | | |
| Normal Lung | 0.7 | 80.7 | Breast Cancer | 0.4 | 39.8 |
| | | | 9100266 | | |
| Lung Met to | 0.3 | 100.0 | Breast Margin | 0.3 | 31.2 |
| Muscle | | | 9100265 | | |
| (ODO4286) | | | | | |
| Muscle Margin | 100.0 | 21.5 | Breast Cancer | 0.2 | 49.0 |
| (ODO4286) | | | A209073 | | |
| Lung Malignant | 0.3 | 57.8 | Breast Margin | 0.0 | 44.8 |
| Cancer | | | A2090734 | | |
| (OD03126) | | | | | |
| Lung Margin | 0.4 | 61.6 | Normal Liver | 1.6 | 4.5 |
| (OD03126) | | | | | |
| Lung Cancer | 0.1 | 70.2 | Liver Cancer | 0.9 | 2.6 |
| (OD04404) | | | | | |
| Lung Margin | 0.3 | 34.2 | Liver Cancer | 1.1 | 4.7 |
| (OD04404) | | | 1025 | | |
| Lung Cancer | 0.0 | 87.7 | Liver Cancer | 1.0 | 18.3 |
| (OD04565) | | | 1026 | | |
| Lung Margin | 0.8 | 23.8 | Liver Cancer | 2.3 | 7.6 |
| (OD04565) | | | 6004-T | | |
| Lung Cancer | 0.2 | 41.5 | Liver Tissue | 0.3 | 12.0 |
| (OD04237-01) | | | 6004-N | | |
| Lung Margin | 0.5 | 34.2 | Liver Cancer | 0.7 | 12.1 |
| (OD04237-02) | | | 6005-T | | |
| Ocular Mel Met to | 1.3 | 97.3 | Liver Tissue | 1.6 | 5.7 |
| Liver (ODO4310) | | | 6005-N | | |
| Liver Margin | 3.2 | 5.0 | Normal Bladder | 0.9 | 38.2 |
| (ODO4310) | | | | | |
| Melanoma | 0.0 | 87.7 | Bladder Cancer | 0.0 | 21.3 |
| Metastasis | | | | | |
| Lung Margin | 0.6 | 56.3 | Bladder Cancer | 0.1 | 46.0 |
| (OD04321) | | | | | |
| Normal Kidney | 18.8 | 30.1 | Bladder Cancer | 0.2 | 96.6 |
| | | | (OD04718-01) | | |
| Kidney Ca, | 7.5 | 46.7 | Bladder Normal | 2.9 | 29.5 |
| Nuclear grade 2 | | | Adjacent | | |
| (OD04338) | | | (OD04718-03) | | |
| Kidney Margin | 6.0 | 14.8 | Normal Ovary | 1.1 | 21.5 |
| (OD04338) | | | | | |
| Kidney Ca | 11.3 | 52.1 | Ovarian Cancer | 0.3 | 73.7 |
| Nuclear grade 1/2 | | | | | |
| (OD04339) | | | | | |
| Kidney Margin | 14.2 | 20.3 | Ovarian Cancer | 0.0 | 48.3 |
| (OD04339) | | | (OD04768-07) | | |
| Kidney Ca, Clear | 2.5 | 49.0 | Ovary Margin | 0.2 | 18.8 |
| cell type | | | (OD04768-08) | | |
| (OD04340) | | | | | |
| Kidney Margin | 11.4 | 23.2 | Normal | 0.9 | 13.9 |
| (OD04340) | | | Stomach | | |
| Kidney Ca, | 0.9 | 42.6 | Gastric Cancer | 0.3 | 6.7 |
| Nuclear grade 3 | | | 9060358 | | |
| (OD04348) | | | | | |
| Kidney Margin | 9.3 | 28.9 | Stomach | 0.3 | 13.2 |
| (OD04348) | | | Margin | | |
| | | | 9060359 | | |
| Kidney Cancer | 0.4 | 50.7 | Gastric Cancer | 1.3 | 28.3 |
| (OD04622-01) | | | 9060395 | | |
| Kidney Margin | 1.7 | 8.6 | Stomach | 0.4 | 18.0 |
| (OD04622-03) | | | Margin | | |
| | | | 9060394 | | |
| Kidney Cancer | 6.2 | 21.8 | Gastric Cancer | 0.4 | 45.4 |
| (OD04450-01) | | | 9060397 | | |
| Kidney Margin | 6.1 | 18.2 | Stomach | 0.0 | 10.4 |
| (OD04450-03) | | | Margin | | |
| | | | 9060396 | | |
| Kidney Cancer | 0.9 | 25.0 | Gastric Cancer | 0.5 | 48.3 |
| 8120607 | | | 064005 | | |

[0815] TABLE 53
Panel 4.1D

| | Rel. Exp. (%) | | Rel. Exp. (%) |
|---|---|---|---|
| | Ag2284, Run | | Ag2284, Run |
| Tissue Name | 170069125 | Tissue Name | 170069125 |
| Secondary Th1 act | 0.0 | HUVEC IL-1beta | 0.0 |
| Secondary Th2 act | 1.0 | HUVEC IFN gamma | 0.0 |
| Secondary Tr1 act | 0.0 | HUVEC TNF alpha + IFN | 0.0 |
| | | gamma | |
| Secondary Th1 rest | 0.7 | HUVEC TNF alpha + IL4 | 0.0 |
| Secondary Th2 rest | 0.5 | HUVEC IL-11 | 0.0 |
| Secondary Tr1 rest | 0.0 | Lung Microvascular EC none | 0.0 |
| Primary Th1 act | 0.0 | Lung Microvascular EC | 0.0 |
| | | TNFaIpha + IL-1beta | |
| Primary Th2 act | 0.7 | Microvascular Dermal EC | 0.0 |
| | | none | |
| Primary Tr1 act | 0.0 | Microsvasular Dermal EC | 0.0 |
| | | TNF alpha + IL-1beta | |
| Primary Th1 rest | 0.0 | Bronchial epithelium | 1.0 |
| | | TNF alpha + IL1beta | |
| Primary Th2 rest | 0.0 | Small airway epithelium | 0.0 |
| | | none | |
| Primary Tr1 rest | 0.0 | Small airway epithelium | 0.0 |
| | | TNF alpha + IL-1beta | |
| CD45RA CD4 | 7.5 | Coronery artery SMC rest | 0.0 |
| lymphocyte act | | | |
| CD45RO CD4 | 0.0 | Coronery artery SMC | 0.0 |
| lymphocyte act | | TNF alpha + IL-1beta | |
| CD8 lymphocyte act | 0.0 | Astrocytes rest | 1.9 |
| Secondary CD8 | 0.0 | Astrocytes TNF alpha + IL- | 3.2 |
| lymphocyte rest | | 1beta | |
| Secondary CD8 | 0.0 | KU-812 (Basophil) rest | 0.0 |
| lymphocyte act | | | |
| CD4 lymphocyte none | 0.0 | KU-812 (Basophil) | 0.9 |
| | | PMA/ionomycin | |
| 2ry Th1/Th2/Tr1_anti- | 1.2 | CCD1106 (Keratinocytes) | 0.0 |
| CD95 CH11 | | none | |
| LAK cells rest | 0.8 | CCD1106 (Keratinocytes) | 0.0 |
| | | TNF alpha + IL-1beta | |
| LAK cells IL-2 | 0.0 | Liver cirrhosis | 2.2 |
| LAK cells IL-2 + IL-12 | 0.4 | NCI-H292 none | 0.8 |
| LAK cells IL-2 + IFN | 0.0 | NCI-H292 IL-4 | 0.0 |
| gamma | | | |
| LAK cells IL-2 + IL-18 | 0.0 | NCI-H292 IL-9 | 0.0 |
| LAK cells | 1.5 | NCI-H292 IL-13 | 0.0 |
| PMA/ionomycin | | | |
| NK Cells IL-2 rest | 1.3 | NCI-H292 IFN gamma | 0.0 |
| Two Way MLR 3 day | 1.3 | HPAEC none | 0.0 |
| Two Way MLR 5 day | 1.8 | HPAEC TNF alpha + IL-1 | 0.0 |
| | | beta | |
| Two Way MLR 7 day | 0.0 | Lung fibroblast none | 27.9 |
| PBMC rest | 0.0 | Lung fibroblast TNF alpha + | 4.7 |
| | | IL-1beta | |
| PBMC PWM | 0.9 | Lung fibroblast IL-4 | 19.3 |
| PBMC PHA-L | 0.0 | Lung fibroblast IL-9 | 32.3 |
| Ramos (B cell) none | 0.0 | Lung fibroblast IL-13 | 11.4 |
| Ramos (B cell) | 0.0 | Lung fibroblast IFN gamma | 9.9 |
| ionomycin | | | |
| B lymphocytes PWM | 0.8 | Dermal fibroblast CCD1070 | 43.2 |
| | | rest | |
| B lymphocytes CD40L | 0.0 | Dermal fibroblast CCD1070 | 31.0 |
| and IL-4 | | TNF alpha | |
| EOL-1 dbcAMP | 0.0 | Dermal fibroblast CCD1070 | 7.4 |
| | | IL-1beta | |
| EOL-1 dbcAMP | 0.0 | Dermal fibroblast IFN | 5.8 |
| PMA/ionomycin | | gamma | |
| Dendritic cells none | 0.0 | Dermal fibroblast IL-4 | 38.4 |
| Dendritic cells LPS | 0.5 | Dermal Fibroblasts rest | 24.7 |
| Dendritic cells anti- | 0.9 | Neutrophils TNFa + LPS | 0.0 |
| CD40 | | | |
| Monocytes rest | 0.0 | Neutrophils rest | 0.0 |
| Monocytes LPS | 2.4 | Colon | 1.0 |
| Macrophages rest | 8.9 | Lung | 7.3 |
| Macrophages LPS | 0.0 | Thymus | 3.1 |
| HUVEC none | 0.0 | Kidney | 100.0 |
| HUVEC starved | 0.0 | | |

[0816] TABLE 54
Panel 4D

| | Rel. Exp. (%) | | Rel. Exp. (%) |
|---|---|---|---|
| | Ag2011, Run | | Ag2011, Run |
| Tissue Name | 160997385 | Tissue Name | 160997385 |
| Secondary Th1 act | 4.7 | HUVEC IL-1beta | 2.0 |
| Secondary Th2 act | 6.4 | HUVEC IFN gamma | 4.0 |
| Secondary Tr1 act | 8.6 | HUVEC TNF alpha + IFN | 5.0 |
| | | gamma | |
| Secondary Th1 rest | 0.6 | HUVEC TNF alpha + IL4 | 8.4 |
| Secondary Th2 rest | 1.7 | HUVEC IL-11 | 3.5 |
| Secondary Tr1 rest | 1.7 | Lung Microvascular EC none | 13.0 |
| Primary Th1 act | 14.0 | Lung Microvascular EC | 15.3 |
| | | TNF alpha + IL-1beta | |
| Primary Th2 act | 7.7 | Microvascular Dermal EC | 23.2 |
| | | none | |
| Primary Tr1 act | 12.9 | Microsvasular Dermal EC | 17.3 |
| | | TNF alpha + IL-1beta | |
| Primary Th1 rest | 3.3 | Bronchial epithelium | 4.5 |
| | | TNF alpha + IL-1beta | |
| Primary Th2 rest | 2.3 | Small airway epithelium | 16.0 |
| | | none | |
| Primary Tr1 rest | 2.0 | Small airway epithelium | 100.0 |
| | | TNF alpha + IL-1beta | |
| CD45RA CD4 | 6.5 | Coronery artery SMC rest | 15.7 |
| lymphocyte act | | | |
| CD45RO CD4 | 5.3 | Coronery artery SMC | 11.1 |
| lymphocyte act | | TNF alpha + IL-1beta | |
| CD8 lymphocyte act | 3.3 | Astrocytes rest | 25.3 |
| Secondary CD8 | 7.2 | Astrocytes TNF alpha + IL- | 21.6 |
| lymphocyte rest | | 1beta | |
| Secondary CD8 | 3.0 | KU-812 (Basophil) rest | 8.4 |
| lymphocyte act | | | |
| CD4 lymphocyte none | 1.6 | KU-812 (Basophil) | 39.5 |
| | | PMA/ionomycin | |
| 2ry Th1/Th2/Tr1_anti- | 0.3 | CCD1106 (Keratinocytes) | 35.1 |
| CD95 CH11 | | none | |
| LAK cells rest | 19.1 | CCD1106 (Keratinocytes) | 59 |
| | | TNF alpha + IL-1beta | |
| LAK cells IL-2 | 3.1 | Liver cirrhosis | 0.9 |
| LAK cells IL-2 + IL-12 | 6.5 | Lupus kidney | 1.3 |
| LAK cells IL-2 + IFN | 9.8 | NCI-H292 none | 42.3 |
| gamma | | | |
| LAK cells IL-2 + IL-18 | 5.9 | NCI-H292 IL-4 | 90.1 |
| LAK cells | 8.7 | NCI-H292 IL-9 | 58.2 |
| PMA/ionomycin | | | |
| NK Cells IL-2 rest | 1.7 | NCI-H292 IL-13 | 33.9 |
| Two Way MLR 3 day | 9.3 | NCI-H292 IFN gamma | 30.4 |
| Two Way MLR 5 day | 7.4 | HPAEC none | 5.8 |
| Two Way MLR 7 day | 2.0 | HPAEC TNF alpha + IL-1 | 12.9 |
| | | beta | |
| PBMC rest | 1.7 | Lung fibroblast none | 23.8 |
| PBMC PWM | 12.5 | Lung fibroblast TNF alpha + | 10.7 |
| | | IL-1beta | |
| PBMC PHA-L | 5.4 | Lung fibroblast IL-4 | 59.0 |
| Ramos (B cell) none | 0.5 | Lung fibroblast IL-9 | 40.6 |
| Ramos (B cell) | 0.9 | Lung fibroblast IL-13 | 31.0 |
| ionomycin | | | |
| B lymphocytes PWM | 15.6 | Lung fibroblast IFN gamma | 65.5 |
| B lymphocytes CD40L | 5.8 | Dermal fibroblast CCD1070 | 37.4 |
| and IL-4 | | rest | |
| EOL-1 dbcAMP | 3.5 | Dermal fibroblast CCD1070 | 50.0 |
| | | TNF alpha | |
| EOL-1 dbcAMP | 60.3 | Dermal fibroblast CCD1070 | 19.6 |
| PMA/ionomycin | | IL-1beta | |
| Dendritic cells none | 17.6 | Dermal fibroblast IFN | 15.0 |
| | | gamma | |
| Dendritic cells LPS | 32.5 | Dermal fibroblast IL-4 | 43.8 |
| Dendritic cells anti- | 21.0 | IBD Colitis 2 | 0.3 |
| CD40 | | | |
| Monocytes rest | 0.1 | IBD Crohn's | 0.8 |
| Monocytes LPS | 8.4 | Colon | 5.3 |
| Macrophages rest | 34.2 | Lung | 15.0 |
| Macrophages LPS | 11.3 | Thymus | 5.8 |
| HUVEC none | 6.5 | Kidney | 11.4 |
| HUVEC starved | 9.3 | | |

[0817] Panel 1.2 Summary: Ag1508 The expression of the NOV6 gene is highest in a sample derived from skeletal muscle (CT=19.5). Thus, this gene could be used to distinguish skeletal muscle from other tissues. Expression of the NOV6 gene is also high in kidney (CT=23).

[0818] The NOV6 gene is also moderately expressed in other metabolically relevant tissues including heart, adrenal gland, pancreas, thyroid, pituitary gland, and liver (CT values from 29-32). The widespread expression of the NOV6 gene in tissues with metabolic function suggests a role in metabolic disorders such as obesity and diabetes.

[0819] The NOV6 gene is moderately expressed in the brain in at least the thalamus, hippocampus, cerebellum, amygdala and is highly expressed in the cerebral cortex, suggesting that this gene product has functional significance in the CNS. Please see Panel 1.3D for potential utility of this gene in the central nervous system.

[0820] Panel 1.3D Summary: Ag1586/2011/Ag2284 Two experiments with the same probe and primer set produce results that are in excellent agreement. The NOV6 gene appears to be expressed largely in cancer cell lines, with highest expression in a melanoma cell line (CTs=26-28). Of note is the expression associated with colon cancer cell lines and melanoma cell lines. Thus, the expression of thie gene could be used to distinguish these samples from other samples on the panel. Moreover, therapeutic modulation of this gene, through the use of small molecule drugs, antibodies or protein therapeutics might be of use in the treatment of colon cancer or melanoma.

[0821] The NOV6 gene is modestly expressed (CT values=31-34) in a variety of metabolic tissues including pancreas, adrenal, thyroid, pituitary, fetal liver, and adipose. Thus, this gene product may be an antibody target for the treatment of metabolic disease, including obesity and diabetes, in any or all of these tissues. Furthermore, the NOV6 is expressed at higher levels in fetal (CT values=26-28) versus adult heart (CT values=31-33), and in fetal (CT values=26-28) versus adult skeletal muscle (CT values=32-33), and may be used to differentiate between the adult and fetal sources of these tissues. Furthermore, the higher levels of expression in the fetal tissues suggest that the NOV6 gene product may be involved in the development of heart and skeletal muscle tissue. Thus, therapeutic modulation of the expression or function of the protein encoded by the NOV6 gene may be beneficial in the treatment of diseases that result in weak or dystrophic heart or skeletal muscle tissue, including ardiomyopathy, atherosclerosis, hypertension, congenital heart defects, aortic stenosis, atrial septal defect (ASD), atrioventricular (A-V) canal defect, ductus arteriosus, pulmonary stenosis, subaortic stenosis, ventricular septal defect (VSD), valve diseases, muscular dystrophy, Lesch-Nyhan syndrome, and myasthenia gravis.

[0822] This gene represents a novel protein with homology to a plexin that is expressed at moderate to high levels in all brain regions examined. Plexins act as receptors for semaphorins in the CNS. The interactions of the semaphorins and their receptors are critical for axon guidance. Therefore, this gene product may be useful as a drug target in clinical conditions where axonal growth and/or compensatory synaptogenesis are desireable (spinal cord or head trauma, stroke, or neurodegenerative diseases such as Alzheimer's, Parkinson's, or Huntington's disease).

[0823] References:

[0824] 1. Pasterkamp R J, Ruitenberg M J, Verhaagen J. Semaphorins and their receptors in olfactory axon guidance. Cell Mol Biol (Noisy-le-grand) September 1999; 45(6):763-79

[0825] The mammalian olfactory system is capable of discriminating among a large variety of odor molecules and is therefore essential for the identification of food, enemies and mating partners. The assembly and maintenance of olfactory connectivity have been shown to depend on the combinatorial actions of a variety of molecular signals, including extracellular matrix, cell adhesion and odorant receptor molecules. Recent studies have identified semaphorins and their receptors as putative molecular cues involved in olfactory pathfinding, plasticity and regeneration. The semaphorins comprise a large family of secreted and transmembrane axon guidance proteins, being either repulsive or attractive in nature. Neuropilins were shown to serve as receptors for secreted class 3 semaphorins, whereas members of the plexin family are receptors for class 1 and V (viral) semaphorins. The present review will discuss a role for semaphorins and their receptors in the establishment and maintenance of olfactory connectivity.

[0826] 2. Murakami Y, Suto F, Shimizu M, Shinoda T, Kameyama T, Fujisawa H. Differential expression of plexin-A subfamily members in the mouse nervous system. Dev Dyn March 2001; 220(3):246-58

[0827] Plexins comprise a family of transmembrane proteins (the plexin family) which are expressed in nervous tissues. Some plexins have been shown to interact directly with secreted or transmembrane semaphorins, while plexins belonging to the A subfamily are suggested to make complexes with other membrane proteins, neuropilins, and propagate chemorepulsive signals of secreted semaphorins of class 3 into cells or neurons. Despite that much information has been gathered on the plexin-semaphorin interaction, the role of plexins in the nervous system is not well understood. To gain insight into the functions of plexins in the nervous system, we analyzed spatial and temporal expression patterns of three members of the plexin-A subfamily (plexin-A1, -A2, and -A3) in the developing mouse nervous system by in situ hybridization analysis in combination with immunohistochemistry. We show that the three plexins are differentially expressed in sensory receptors or neurons in a developmentally regulated manner, suggesting that a particular plexin or set of plexins is shared by neuronal elements and functions as the receptor for semaphorins to regulate neuronal development.

[0828] Panel 2.2 Summary: Ag2011 The expression of thie gene appears to be highest in a sample derived from a melanoma metastasis. In addition, there is substantial expression in another melanoma sample. This expression is concordant with the expression detected in Panel 1.3D. Thus, the expression of this gene could be used to distinguish melanoma from other cancer types in this panel. Moreover, therapeutic modulation of this gene, through the use of small molecule drugs, antibodies or protein therapeutics might be of use in the treatment of melanoma.

[0829] Panel 2D Summary: Ag1508/Ag1586 Expression of the SC126413398_A gene in this panel is highest in a sample of muscle tissue adjacent to a metastatic cancer and in a metastasis of lung cancer.

[0830] Panel 4.1D Summary: Ag2284 Significant expression in this panel is limited to kidney. This observation is consistent with what was observed in other panels. Therefore, therapuetic drugs designed against the SC126413398_A gene product may be important for regulating the function of the kidney.

[0831] Panel 4D Summary: Ag2011 Significant expression of this transcript is found in small airway epithelium upon treatment with the pro-inflammatory cytokines TNF-a and IL-1b (CT=26.5), the muco-epidermoid cell line H 292 treated with IL-4 or IL-9, and in lung fibroblasts treated with IFN-g or IL-4. The constitutive expression of this transcript in these tissues is highly up-regulated by pro-inflammatory cytokines or in conditions reflecting a Th2 mediated mechanism. Therefore, modulation of the expression of the protein encoded by this transcript could be useful for the treatment of lung inflammatory diseases that result from infection of the lung (bronchitis, pneumonia) and for the treatment of Th2 -mediated lung disease such as asthma or COPD. Significant expression of this transcript is also found in eosinophils upon PMA and ionomycin treatment, conditions that lead to production of eosinophil specific mediators. This production could contribute to the pathologies associated with asthma, other atopic diseases and inflammatory bowel disease. This gene encodes a novel protein with homology to members of the plexin family, a family of transmembrane proteins which act as receptors for semaphorins. In neurons, semaphorins provide essential attractive and repulsive cues that are necessary for axon guidance. The description of the interaction of plexin wih tyrosine kinase in the fetal lung suggests that this protein may play a role not only in morphogenesis but also in proliferation of activation. (See reference below.) Therefore, modulation of the experession of this protein by either antibody or small molecules could be beneficial for the treatment of inflammatory lung, bowel and skin diseases.

[0832] Reference:

[0833] 1. Cell Oct. 1, 1999; 99(1):71-80

[0834] Plexins are a large family of receptors for transmembrane, secreted, and GPI-anchored semaphorins in vertebrates.

[0835] Tamagnone L, Artigiani S, Chen H, He Z, Ming G I, Song H, Chedotal A, Winberg M L, Goodman C S, Poo M, Tessier-Lavigne M, Comoglio P M.

[0836] Institute for Cancer Research and Treatment, University of Torino, Candiolo, Italy. Itamagnone@ircc.unito.it

[0837] In Drosophila, plexin A is a functional receptor for semaphorin-1a. Here we show that the human plexin gene family comprises at least nine members in four subfamilies. Plexin-B1 is a receptor for the transmembrane semaphorin Sema4D (CD 100), and plexin-C1 is a receptor for the GPI-anchored semaphorin Sema7A (Sema-K1). Secreted (class 3) semaphorins do not bind directly to plexins, but rather plexins associate with neuropilins, coreceptors for these semaphorins. Plexins are widely expressed: in neurons, the expression of a truncated plexin-A1 protein blocks axon repulsion by Sema3A. The cytoplasmic domain of plexins associates with a tyrosine kinase activity. Plexins may also act as ligands mediating repulsion in epithelial cells in vitro. We conclude that plexins are receptors for multiple (and perhaps all) classes of semaphorins, either alone or in combination with neuropilins, and trigger a novel signal transduction pathway controlling cell repulsion

[0838] PMID: 10520995

[0839] NOV7

[0840] Expression of gene NOV7 was assessed using the primer-probe sets Ag2262 and Ag2316, described in Tables 55 and 56. Results of the RTQ-PCR runs are shown in Tables 57, 58and59.

TABLE 55

Probe Name Ag2262

| | | | Start | SEQ ID |
|---|---|---|---|---|
| Primers | Sequences | Length | Position | NO: |
| Forward | 5′-gacctggtgtacatggagga-3′ | 20 | 761 | 172 |
| Probe | TET-5′-cttctgccggcccagcaagtact-3′-TAMRA | 23 | 790 | 173 |
| Reverse | 5′-gagcacaccctacctgctg-3′ | 19 | 822 | 174 |

[0841] TABLE 56

Probe Name Ag2316

| | | | | |
|---|---|---|---|---|
| | | | | SEQ |
| | | | Start | ID |
| Primers | Sequences | Length | Position | NO: |

| | | | | |
|---|---|---|---|---|
| Forward | 5′-gtccaagagaggaaacaagga | 21 | 457 | 175 |
| | -3′ | | | |
| Probe | TET-5′-cacaatacccacgtgg- | 24 | 500 | 176 |
| | gcatcaag-3′-TAMRA | | | |
| Reverse | 5′-gtcctgaggccactcttcac- | 20 | 527 | 177 |
| | 3′ | | | |

[0842] TABLE 57
Panel 1.3D

| | Rel. | Rel. | Rel. | | Rel. | Rel. | Rel. |
|---|---|---|---|---|---|---|---|
| | Exp. (%) | Exp. (%) | Exp. (%) | | Exp. (%) | Exp. (%) | Exp. (%) |
| | Ag2262, | Ag2262, | Ag2316, | | Ag2262, | Ag2262, | Ag2316, |
| | Run | Run | Run | Tissue | Run | Run | Run |
| Tissue Name | 150719071 | 167966858 | 162185396 | Name | 150719071 | 167966858 | 162185396 |
| Liver | 0.0 | 6.7 | 0.0 | Kidney | 24.0 | 100.0 | 50.0 |
| adenocarcinoma | | | | (fetal) | | | |
| Pancreas | 0.0 | 0.0 | 0.0 | Renal ca. | 0.0 | 0.0 | 0.0 |
| | | | | 786-0 | | | |
| Pancreatic ca. | 0.0 | 0.0 | 0.0 | Renal ca. | 0.0 | 12.6 | 0.0 |
| CAPAN 2 | | | | A498 | | | |
| Adrenal gland | 1.9 | 0.0 | 0.0 | Renal ca. | 0.0 | 0.0 | 0.0 |
| | | | | RXF 393 | | | |
| Thyroid | 2.2 | 0.0 | 0.0 | Renal ca. | 0.0 | 0.0 | 0.0 |
| | | | | ACHN | | | |
| Salivary gland | 0.3 | 0.0 | 0.0 | Renal ca. | 0.2 | 0.0 | 0.0 |
| | | | | UO-31 | | | |
| Pituitary gland | 0.0 | 8.0 | 0.0 | Renal ca. | 0.0 | 0.0 | 0.0 |
| | | | | TK-10 | | | |
| Brain (fetal) | 0.0 | 1.0 | 0.0 | Liver | 0.0 | 0.0 | 0.0 |
| Brain (whole) | 5.2 | 0.0 | 26.2 | Liver (fetal) | 0.0 | 0.0 | 0.0 |
| Brain | 6.8 | 3.8 | 11.5 | Liver ca. | 0.0 | 0.0 | 0.0 |
| (amygdala) | | | | (hepatoblast) | | | |
| | | | | HepG2 | | | |
| Brain | 1.0 | 6.4 | 0.0 | Lung | 6.8 | 0.0 | 19.3 |
| (cerebellum) | | | | | | | |
| Brain | 16.5 | 0.0 | 0.0 | Lung (fetal) | 8.5 | 0.0 | 6.8 |
| (hippocampus) | | | | | | | |
| Brain | 2.0 | 0.0 | 0.0 | Lung ca. | 0.0 | 0.0 | 0.0 |
| (substantia | | | | (small cell) | | | |
| nigra) | | | | LX-1 | | | |
| Brain | 4.9 | 11.2 | 57.0 | Lung ca. | 0.3 | 0.0 | 0.0 |
| (thalamus) | | | | (small cell) | | | |
| | | | | NCI-H69 | | | |
| Cerebral Cortex | 2.5 | 13.3 | 3.3 | Lung ca. | 2.5 | 6.9 | 0.0 |
| | | | | (s.cell var.) | | | |
| | | | | SHP-77 | | | |
| Spinal cord | 3.3 | 9.2 | 6.8 | Lung ca. | 0.0 | 0.0 | 0.0 |
| | | | | (large | | | |
| | | | | cell)NCI- | | | |
| | | | | H460 | | | |
| glio/astro U87- | 0.0 | 0.0 | 0.0 | Lung ca. | 0.0 | 6.4 | 0.0 |
| MG | | | | (non-sm. | | | |
| | | | | cell) A549 | | | |
| glio/astro U- | 0.0 | 0.0 | 0.0 | Lung ca. | 0.0 | 0.0 | 0.0 |
| 118-MG | | | | (non-s.cell) | | | |
| | | | | NCI-H23 | | | |
| astrocytoma | 0.0 | 0.0 | 0.0 | Lung ca. | 0.0 | 0.0 | 0.0 |
| SW1783 | | | | (non-s.cell) | | | |
| | | | | HOP-62 | | | |
| neuro*; met | 0.0 | 0.0 | 0.0 | Lung ca. | 2.8 | 0.0 | 0.0 |
| SK-N-AS | | | | (non-s.cl) | | | |
| | | | | NCI-H522 | | | |
| astrocytoma SF- | 0.0 | 0.0 | 0.0 | Lung ca. | 0.0 | 0.0 | 0.0 |
| 539 | | | | (squam.) SW | | | |
| | | | | 900 | | | |
| astrocytoma | 0.0 | 0.0 | 0.0 | Lung ca. | 0.0 | 0.0 | 0.0 |
| SNB-75 | | | | (squam.) | | | |
| | | | | NCI-H596 | | | |
| glioma SNB-19 | 0.0 | 0.0 | 0.0 | Mammary | 0.0 | 0.0 | 0.0 |
| | | | | gland | | | |
| glioma U251 | 0.0 | 0.0 | 0.0 | Breast ca.* | 0.0 | 0.0 | 0.0 |
| | | | | (pl.ef) | | | |
| | | | | MCF-7 | | | |
| glioma SF-295 | 0.0 | 0.0 | 0.0 | Breast ca.* | 0.0 | 0.0 | 0.0 |
| | | | | (pl.ef) | | | |
| | | | | MDA-MB- | | | |
| | | | | 231 | | | |
| Heart (Fetal) | 2.0 | 0.0 | 33.4 | Breast ca.* | 0.0 | 0.0 | 0.0 |
| | | | | (pl.ef) | | | |
| | | | | T47D | | | |
| Heart | 0.0 | 6.7 | 9.6 | Breast ca. | 0.0 | 0.0 | 0.0 |
| | | | | BT-549 | | | |
| Skeletal muscle | 2.5 | 0.0 | 8.2 | Breast ca. | 1.0 | 0.0 | 0.0 |
| (Fetal) | | | | MDA-N | | | |
| Skeletal muscle | 0.0 | 0.0 | 0.0 | Ovary | 0.0 | 0.0 | 6.4 |
| Bone marrow | 0.9 | 0.0 | 0.0 | Ovarian ca. | 0.0 | 0.0 | 0.0 |
| | | | | OVCAR-3 | | | |
| Thymus | 0.0 | 0.0 | 0.0 | Ovarian ca. | 0.0 | 0.0 | 0.0 |
| | | | | OVCAR-4 | | | |
| Spleen | 100.0 | 65.5 | 100.0 | Ovarian ca. | 0.0 | 0.0 | 0.0 |
| | | | | OVCAR-5 | | | |
| Lymph node | 0.0 | 0.0 | 0.0 | Ovarian ca. | 0.0 | 0.0 | 0.0 |
| | | | | OVCAR-8 | | | |
| Colorectal | 10.8 | 19.8 | 0.0 | Ovarian ca. | 0.0 | 0.0 | 0.0 |
| | | | | IGROV-1 | | | |
| Stomach | 2.7 | 0.0 | 0.0 | Ovarian ca. | 0.0 | 0.0 | 0.0 |
| | | | | (ascites) SK- | | | |
| | | | | OV-3 | | | |
| Small intestine | 6.4 | 0.0 | 0.0 | Uterus | 0.0 | 0.0 | 0.0 |
| Colon ca. | 0.0 | 0.0 | 0.0 | Placenta | 0.6 | 7.1 | 0.0 |
| SW480 | | | | | | | |
| Colon ca.* | 1.2 | 0.0 | 0.0 | Prostate | 0.0 | 1.8 | 4.9 |
| SW620 (SW480 | | | | | | | |
| met) | | | | | | | |
| Colon ca. HT29 | 0.0 | 0.0 | 0.0 | Prostate ca.* | 0.0 | 0.0 | 0.0 |
| | | | | (bone met) | | | |
| | | | | PC-3 | | | |
| Colon ca. HCT- | 0.0 | 0.0 | 0.0 | Testis | 1.7 | 0.0 | 7.2 |
| 116 | | | | | | | |
| Colon ca. | 2.5 | 6.6 | 0.0 | Melanoma | 0.0 | 0.0 | 0.0 |
| CaCo-2 | | | | Hs688(A).T | | | |
| CC Well to | 0.0 | 0.0 | 0.0 | Melanoma* | 0.0 | 0.0 | 0.0 |
| Mod Diff | | | | (met) | | | |
| (ODO3866) | | | | Hs688(B).T | | | |
| Colon ca. HCC- | 0.0 | 0.0 | 0.0 | Melanoma | 0.0 | 0.0 | 0.0 |
| 2998 | | | | UACC-62 | | | |
| Gastric ca. | 0.0 | 14.7 | 0.0 | Melanoma | 0.0 | 0.0 | 0.0 |
| (liver met) NCI- | | | | M14 | | | |
| N87 | | | | | | | |
| Bladder | 0.0 | 6.5 | 16.2 | Melanoma | 0.0 | 0.0 | 0.0 |
| | | | | LOX IMVI | | | |
| Trachea | 5.0 | 0.0 | 6.0 | Melanoma* | 0.0 | 0.0 | 0.0 |
| | | | | (met) SK- | | | |
| | | | | MEL-5 | | | |
| Kidney | 14.9 | 7.9 | 31.0 | Adipose | 0.0 | 0.0 | 7.6 |

[0843] TABLE 58
Panel 2D

| | Rel. Exp. (%) | | Rel. Exp. (%) |
|---|---|---|---|
| | Ag2262, Run | | Ag2262, Run |
| Tissue Name | 150943107 | Tissue Name | 150943107 |
| Normal Colon | 14.2 | Kidney Margin | 24.0 |
| | | 8120608 | |
| CC Well to Mod Diff | 14.2 | Kidney Cancer 8120613 | 0.0 |
| (ODO3866) | | | |
| CC Margin (ODO3866) | 0.0 | Kidney Margin | 46.3 |
| | | 8120614 | |
| CC Gr.2 rectosigmoid | 0.0 | Kidney Cancer 9010320 | 0.0 |
| (ODO3868) | | | |
| CC Margin (ODO3868) | 0.0 | Kidney Margin | 16.5 |
| | | 9010321 | |
| CC Mod Diff (ODO3920) | 0.0 | Normal Uterus | 16.4 |
| CC Margin (ODO3920) | 0.8 | Uterine Cancer 064011 | 0.0 |
| CC Gr.2 ascend colon | 0.0 | Normal Thyroid | 15.6 |
| (ODO3921) | | | |
| CC Margin (ODO3921) | 0.9 | Thyroid Cancer | 0.0 |
| CC from Partial | 0.0 | Thyroid Cancer | 6.8 |
| Hepatectomy (ODO4309) | | A302152 | |
| Mets | | | |
| Liver Margin (ODO4309) | 1.1 | Thyroid Margin | 0.0 |
| | | A302153 | |
| Colon mets to lung | 7.3 | Normal Breast | 9.3 |
| (OD04451-01) | | | |
| Lung Margin (OD04451-02) | 0.0 | Breast Cancer | 0.0 |
| Normal Prostate 6546-1 | 18.6 | Breast Cancer | 4.8 |
| | | (OD04590-01) | |
| Prostate Cancer (OD04410) | 10.2 | Breast Cancer Mets | 8.5 |
| | | (OD04590-03) | |
| Prostate Margin (OD04410) | 0.0 | Breast Cancer | 0.0 |
| | | Metastasis | |
| Prostate Cancer (OD04720- | 0.0 | Breast Cancer | 7.2 |
| 01) | | | |
| Prostate Margin (OD04720- | 9.8 | Breast Cancer | 0.0 |
| 02) | | | |
| Normal Lung | 22.5 | Breast Cancer 9100266 | 0.7 |
| Lung Met to Muscle | 6.1 | Breast Margin 9100265 | 0.0 |
| (ODO4286) | | | |
| Muscle Margin (ODO4286) | 0.0 | Breast Cancer A209073 | 0.0 |
| Lung Malignant Cancer | 5.4 | Breast Margin | 0.0 |
| (OD03126) | | A2090734 | |
| Lung Margin (OD03126) | 0.0 | Normal Liver | 0.0 |
| Lung Cancer (OD04404) | 7.6 | Liver Cancer | 0.0 |
| Lung Margin (OD04404) | 3.8 | Liver Cancer 1025 | 5.6 |
| Lung Cancer (OD04565) | 0.0 | Liver Cancer 1026 | 2.4 |
| Lung Margin (OD04565) | 0.0 | Liver Cancer 6004-T | 0.0 |
| Lung Cancer (OD04237-01) | 0.0 | Liver Tissue 6004-N | 8.7 |
| Lung Margin (OD04237-02) | 6.9 | Liver Cancer 6005-T | 0.0 |
| Ocular Mel Met to Liver | 1.1 | Liver Tissue 6005-N | 0.0 |
| (ODO4310) | | | |
| Liver Margin (ODO4310) | 28.5 | Normal Bladder | 0.0 |
| Melanoma Metastasis | 0.0 | Bladder Cancer | 0.0 |
| Lung Margin (OD04321) | 0.0 | Bladder Cancer | 18.3 |
| Normal Kidney | 100.0 | Bladder Cancer | 0.0 |
| | | (OD04718-01) | |
| Kidney Ca, Nuclear grade 2 | 15.2 | Bladder Normal | 0.0 |
| (OD04338) | | Adjacent (OD04718-03) | |
| Kidney Margin (OD04338) | 40.3 | Normal Ovary | 0.0 |
| Kidney Ca Nuclear grade | 0.0 | Ovarian Cancer | 7.5 |
| 1/2 (OD04339) | | | |
| Kidney Margin (OD04339) | 50.0 | Ovarian Cancer | 0.0 |
| | | (OD04768-07) | |
| Kidney Ca, Clear cell type | 0.0 | Ovary Margin | 0.0 |
| (OD04340) | | (OD04768-08) | |
| Kidney Margin (OD04340) | 31.2 | Normal Stomach | 13.8 |
| Kidney Ca, Nuclear grade 3 | 0.0 | Gastric Cancer 9060358 | 0.0 |
| (OD04348) | | | |
| Kidney Margin (OD04348) | 29.9 | Stomach Margin | 0.0 |
| | | 9060359 | |
| Kidney Cancer (OD04622- | 0.0 | Gastric Cancer 9060395 | 0.0 |
| 01) | | | |
| Kidney Margin (OD04622- | 58.6 | Stomach Margin | 0.0 |
| 03) | | 9060394 | |
| Kidney Cancer (OD04450- | 0.0 | Gastric Cancer 9060397 | 0.0 |
| 01) | | | |
| Kidney Margin (OD04450- | 95.9 | Stomach Margin | 0.0 |
| 03) | | 9060396 | |
| Kidney Cancer 8120607 | 0.0 | Gastric Cancer 064005 | 0.0 |

[0844] TABLE 59
Panel 4D

| | Rel. Exp. (%) | Rel. Exp. (%) | | Rel. Exp. (%) | Rel. Exp. (%) |
|---|---|---|---|---|---|
| | Ag2262, Run | Ag2316, Run | | Ag2262, Run | Ag2316, Run |
| Tissue Name | 150981162 | 164037437 | Tissue Name | 150981162 | 164037437 |
| Secondary Th1 act | 0.0 | 0.0 | HUVEC IL-1beta | 0.0 | 0.0 |
| Secondary Th2 act | 0.0 | 0.0 | HUVEC IFN | 0.0 | 0.0 |
| | | | gamma | | |
| Secondary Tr1 act | 0.0 | 0.0 | HUVEC TNF alpha + | 11.6 | 0.0 |
| | | | IFN gamma | | |
| Secondary Th1 rest | 0.0 | 0.0 | HUVEC TNF alpha + | 0.0 | 0.0 |
| | | | IL4 | | |
| Secondary Th2 rest | 0.0 | 0.0 | HUVEC IL-11 | 8.7 | 0.0 |
| Secondary Tr1 rest | 0.0 | 0.0 | Lung Microvascular | 0.0 | 0.0 |
| | | | EC none | | |
| Primary Th1 act | 0.0 | 0.0 | Lung Microvascular | 0.0 | 0.0 |
| | | | EC TNF alpha + IL- | | |
| | | | 1 beta | | |
| Primary Th2 act | 0.0 | 0.0 | Microvascular | 0.0 | 0.0 |
| | | | Dermal EC none | | |
| Primary Tr1 act | 1.8 | 0.0 | Microsvasular | 0.0 | 0.0 |
| | | | Dermal EC | | |
| | | | TNF alpha + IL- | | |
| | | | 1 beta | | |
| Primary Th1 rest | 0.0 | 0.0 | Bronchial | 0.0 | 0.0 |
| | | | epithelium | | |
| | | | TNF alpha + | | |
| | | | IL1 beta | | |
| Primary Th2 rest | 0.0 | 0.0 | Small airway | 0.0 | 0.0 |
| | | | epithelium none | | |
| Primary Tr1 rest | 0.0 | 0.0 | Small airway | 0.0 | 0.0 |
| | | | epithelium | | |
| | | | TNF alpha + IL- | 0.0 | 0.0 |
| | | | 1 beta | | |
| CD45RA CD4 | 0.0 | 0.0 | Coronery artery | 0.0 | 0.0 |
| lymphocyte act | | | SMC rest | | |
| CD45RO CD4 | 0.0 | 0.0 | Coronery artery | 0.0 | 0.0 |
| lymphocyte act | | | SMC TNF alpha + | | |
| | | | IL-1 beta | | |
| CD8 lymphocyte act | 0.0 | 0.0 | Astrocytes rest | 0.0 | 0.0 |
| Secondary CD8 | 0.0 | 0.0 | Astrocytes | 0.0 | 0.0 |
| lymphocyte rest | | | TNF alpha + IL- | | |
| | | | 1 beta | | |
| Secondary CD8 | 0.0 | 0.0 | KU-812 (Basophil) | 0.0 | 25.3 |
| lymphocyte act | | | rest | | |
| CD4 lymphocyte | 0.0 | 0 0 | KU-812 (Basophil) | 0.0 | 0 0 |
| none | | | PMA/ionomycin | | |
| 2ry | 0.0 | 0.0 | CCD1106 | 0.0 | 0 0 |
| Th1/Th2/Tr1_anti- | | | (Kerationcytes) | | |
| CD95 CH11 | | | none | | |
| LAK cells rest | 0.0 | 00 | CCD1106 | 0.0 | 0.0 |
| | | | (Keratinocytes) | | |
| | | | TNF alpha + IL- | | |
| | | | 1 beta | | |
| LAK cells IL-2 | 0.0 | 0.0 | Liver cirrhosis | 0.0 | 0.0 |
| LAK cells IL-2+IL- | 0.0 | 0.0 | Lupus kidney | 0.0 | 21.9 |
| 12 | | | | | |
| LAK cells IL-2+IFN | 17.3 | 0.0 | NCI-H292 none | 0.0 | 0.0 |
| gamma | | | | | |
| LAK cells IL-2+ IL- | 0.0 | 0.0 | NCI-H292 IL-4 | 0.0 | 0.0 |
| 18 | | | | | |
| LAK cells | 0.0 | 0.0 | NCI-H292 IL-9 | 0.0 | 0.0 |
| PMA/ionomycin | | | | | |
| NK Cells IL-2 rest | 0.0 | 0.0 | NCI-H292 IL-13 | 0.0 | 0.0 |
| Two Way MLR 3 | 0.0 | 0.0 | NCI-H292 IFN | 0.0 | 0.0 |
| day | | | gamma | | |
| Two Way MLR 5 | 17.1 | 0.0 | HPAEC none | 0.0 | 0.0 |
| day | | | | | |
| Two Way MLR 7 | 0.0 | 0.0 | HPAEC TNF alpha + | 1.3 | 0.0 |
| day | | | IL-1 beta | | |
| PBMC rest | 0.0 | 00 | Lung fibroblast | 0.0 | 0.0 |
| | | | none | | |
| PBMC PWM | 0.0 | 0.0 | Lung fibroblast | 0.0 | 0.0 |
| | | | TNF alpha + IL-1 | | |
| | | | beta | | |
| PBMC PHA-L | 0.0 | 0.0 | Lung fibroblast IL-4 | 0.0 | 0.0 |
| Ramos (B cell) none | 0.0 | 0.0 | Lung fibroblast IL-9 | 0.0 | 0.0 |
| Ramos (B cell) | 0.0 | 0.0 | Lung fibroblast IL- | 0.0 | 0.0 |
| ionomycin | | | 13 | | |
| B lymphocytes | 0.0 | 0.0 | Lung fibroblast IFN | 0.0 | 0.0 |
| PWM | | | gamma | | |
| B lymphocytes | 0.0 | 0.0 | Dermal fibroblast | 0.0 | 0.0 |
| CD40L and IL-4 | | | CCD1070 rest | | |
| EOL-1 dbcAMP | 0.0 | 0.0 | Dermal fibroblast | 0.0 | 0.0 |
| | | | CCD1070 TNF | | |
| | | | alpha | | |
| EOL-1 dbcAMP | 0.0 | 0.0 | Dermal fibroblast | 0.0 | 0.0 |
| PMA/ionomycin | | | CCD1070 IL-1 beta | | |
| Dendritic cells none | 0.0 | 0.0 | Dermal fibroblast | 0.0 | 0.0 |
| | | | IFN gamma | | |
| Dendritic cells LPS | 2.9 | 0.0 | Dermal fibroblast | 0.0 | 0.0 |
| | | | IL-4 | | |
| Dendritic cells anti- | 0.0 | 0.0 | IBD Colitis 2 | 0.0 | 0.0 |
| CD40 | | | | | |
| Monocytes rest | 0.0 | 0.0 | IBD Crohn's | 0.0 | 0.0 |
| Monocytes LPS | 0.0 | 0.0 | Colon | 100.0 | 12.7 |
| Macrophages rest | 8.2 | 0.0 | Lung | 72.2 | 0.0 |
| Macrophages LPS | 0.0 | 0.0 | Thymus | 47.3 | 100.0 |
| HUVEC none | 0.0 | 0.0 | Kidney | 0.0 | 0.0 |
| HUVEC starved | 1.8 | 0.0 | | | |

[0845] CNS_neurodegeneration_v1.0 Summary: Ag2316 Data from this one run is not included due to a potential problem in one of the sample wells.

[0846] Panel 1.3D Summary: Ag2262/2316 The expression of this gene was assessed in 3 separate runs using two independent probe and primer sets with significant expression detected in spleen and fetal kidney in all runs. Thus, the expression of this gene could be used to distinguish spleen from other tissues in the panel. Moreover, the expression of this gene could also be used to distinguish fetal kidney tissue from adult kidney tissue.

[0847] Panel 2D Summary: Ag2262 The expression of this gene is highest in a sample derived from normal kidney tissue. Of note was the profound association of the expression of this gene with normal kidney tissue when compared to adjacent malignant tissue. Thus, the expression of this gene could be used to distinguish normal kidney tissue from malignant kidney tissue. Moreover, therapeutic modulation of the expression or function of this gene through the use of small molecule drugs, antibodies or protein therapeutics might be of benefit in the treatment of kidney cancer.

[0848] Panel 4D Summary: Ag2316 This transcript is expressed almost exclusively in the thymus (CT 33.2). Therefore, this transcript could be used for detection of thymic tissues.

[0849] Ag 2262 Using a second set of primers, expression of the NOV7 gene is also found in colon and lung, in addition to its expression in the thymus. Thus, this putative Wnt-15 protein may also play an important role in the normal homeostasis of these tissues. Therefore, therapeutics designed with the protein encoded by this transcript could be important for maintaining or restoring normal function to these organs during inflammation.

[0850] NOV8

[0851] Expression of gene NOV8 was assessed using the primer-probe set Ag2261, described in Table 60. Results of the RTQ-PCR runs are shown in Tables 61, 62 and 63.

TABLE 60

Probe Name Ag2261

| | | | | |
|---|---|---|---|---|
| | | | | SEQ |
| | | | Start | ID |
| Primers | Sequences | Length | Position | NO: |

| | | | | |
|---|---|---|---|---|
| Forward | 5′-ggatgactcgcctagcttct- | 20 | 858 | 178 |
| | 3′ | | | |
| Probe | TET-5′-gccgtaggtgcaccgt- | 23 | 911 | 179 |
| | gagaag-3′-TAMRA | | | |
| Reverse | 5′-agcagatgctctcgcagtt- | 19 | 934 | 180 |
| | 3′ | | | |

[0852] TABLE 61
Panel 1.3D

| | Rel. Exp. (%) | Rel. Exp. (%) | | Rel. Exp. (%) | Rel. Exp. (%) |
|---|---|---|---|---|---|
| | Ag2261, Run | Ag2261, Run | | Ag2261, Run | Ag2261, Run |
| Tissue Name | 150631675 | 152887692 | TissueName | 150631675 | 152887692 |
| Liver | 22.4 | 19.6 | Kidney (fetal) | 2.1 | 0.0 |
| adenocarcinoma | | | | | |
| Pancreas | 3.9 | 2.5 | Renal ca. 786-0 | 0.0 | 0.0 |
| Pancreatic ca. | 5.3 | 3.5 | Renal ca. A498 | 10.2 | 5.3 |
| CAPAN 2 | | | | | |
| Adrenal gland | 2.1 | 0.6 | Renal ca. RXF | 0.0 | 0.0 |
| | | | 393 | | |
| Thyroid | 7.0 | 9.8 | Renal ca. | 0.0 | 2.2 |
| | | | ACHN | | |
| Salivary gland | 1.9 | 2.1 | Renal ca. UO- | 0.0 | 0.0 |
| | | | 31 | | |
| Pituitary gland | 1.0 | 2.2 | Renal ca. TK- | 0.0 | 0.0 |
| | | | 10 | | |
| Brain (fetal) | 6.8 | 4.9 | Liver | 0.0 | 0.0 |
| Brain (whole) | 4.8 | 3.0 | Liver (fetal) | 7.6 | 0.0 |
| Brain (amygdala) | 4.6 | 5.3 | Liver ca. | 0.0 | 0.0 |
| | | | (hepatoblast) | | |
| | | | HepG2 | | |
| Brain (cerebellum) | 1.6 | 1.6 | Lung | 14.3 | 15.8 |
| Brain | 7.5 | 11.3 | Lung (fetal) | 15.1 | 15.4 |
| hippocampus | | | | | |
| Brain (substantia | 1.2 | 2.6 | Lung ca. (small | 1.6 | 0.0 |
| nigra | | | cell) LX-1 | | |
| Brain (thalamus) | 2.5 | 1.7 | Lung ca. (small | 29.5 | 19.1 |
| | | | cell) NCI-H69 | | |
| Cerebral Cortex | 0.0 | 0.0 | Lung ca. (s.cell | 11.0 | 5.1 |
| | | | var.) SHP-77 | | |
| Spinal cord | 1.7 | 2.1 | Lung ca. (large | 0.0 | 0.0 |
| | | | cell)NCI-H460 | | |
| glio/astro U87-MG | 0.0 | 0.0 | Lung ca. (non- | 0.0 | 1.2 |
| | | | sm. cell) A549 | | |
| glio/astro U-118- | 55.1 | 50.3 | Lung ca. (non- | 0.0 | 1.3 |
| MG | | | s.cell) NCI-H23 | | |
| astrocytoma | 0.0 | 7.5 | Lung ca. (non- | 0.0 | 1.7 |
| SW1783 | | | s.cell) HOP-62 | | |
| neuro*; met SK-N- | 0.0 | 0.0 | Lung ca. (non- | 8.0 | 8.3 |
| AS | | | s.cl) NCI-H522 | | |
| astrocytoma SF- | 1.9 | 4.7 | Lung ca. | 4.0 | 0.0 |
| 539 | | | (squam.) SW | | |
| | | | 900 | | |
| astrocytoma SNB- | 2.0 | 4.9 | Lung ca. | 15.8 | 10.2 |
| 75 | | | (squam.) NCI- | | |
| | | | H596 | | |
| glioma SNB-19 | 6.7 | 2.4 | Mammary | 7.2 | 4.1 |
| | | | gland | | |
| glioma U251 | 2.1 | 4.5 | Breast ca.* | 1.7 | 3.4 |
| | | | (pl.ef) MCF-7 | | |
| glioma SF-295 | 10.0 | 0.6 | Breast ca.* | 23.2 | 19.6 |
| | | | (pl.ef) MDA- | | |
| | | | MB-231 | | |
| Heart (Fetal) | 11.1 | 9.9 | Breast ca.* (pl. | 4.3 | 5.8 |
| | | | ef) T47D | | |
| Heart | 4.9 | 6.0 | Breast ca. BT- | 0.0 | 4.2 |
| | | | 549 | | |
| Skeletal muscle | 100.0 | 100.0 | Breast ca. | 0.0 | 0.0 |
| (Fetal) | | | MDA-N | | |
| Skeletal muscle | 5.5 | 8.4 | Ovary | 3.6 | 3.1 |
| Bone marrow | 0.0 | 0.0 | Ovarian ca. | 1.1 | 1.0 |
| | | | OVCAR-3 | | |
| Thymus | 10.0 | 3.9 | Ovarian ca. | 0.0 | 0.0 |
| | | | OVCAR-4 | | |
| Spleen | 3.8 | 4.2 | Ovarian ca. | 0.0 | 0.0 |
| | | | OVCAR-5 | | |
| Lymph node | 5.0 | 1.1 | Ovarian ca. | 1.3 | 4.3 |
| | | | OVCAR-8 | | |
| Colorectal | 3.4 | 5.4 | Ovarian ca. | 0.0 | 0.0 |
| | | | IGROV-1 | | |
| Stomach | 6.0 | 15.4 | Ovarian ca. | 7.5 | 16.0 |
| | | | (ascites) SK- | | |
| | | | OV-3 | | |
| Small intestine | 15.9 | 18.7 | Uterus | 17.8 | 15.1 |
| Colon ca. SW480 | 24.3 | 15.3 | Placenta | 4.6 | 8.2 |
| Colon ca.* SW620 | 0.0 | 0.0 | Prostate | 3.6 | 5.3 |
| (SW480 met) | | | | | |
| Colon ca. HT29 | 0.0 | 0.0 | Prostate ca.* | 1.7 | 1.5 |
| | | | (bone met) PC-3 | | |
| Colon ca. HCT- | 3.8 | 0.6 | Testis | 21.9 | 14.6 |
| 116 | | | | | |
| Colon ca. CaCo-2 | 0.0 | 0.8 | Melanoma | 3.1 | 4.7 |
| | | | Hs688(A).T | | |
| CC Well to Mod | 2.3 | 0.0 | Melanoma* | 0.4 | 1.3 |
| Diff (ODO3866) | | | (met) | | |
| | | | Hs688(B).T | | |
| Colon ca. HCC- | 0.0 | 0.0 | Melanoma | 0.0 | 0.0 |
| 2998 | | | UACC-62 | | |
| Gastric ca. (liver | 16.7 | 14.9 | Melanoma M14 | 0.0 | 0.0 |
| met) NCI-N87 | | | | | |
| Bladder | 1.6 | 3.2 | Melanoma LOX | 0.0 | 0.0 |
| | | | IMVI | | |
| Trachea | 24.3 | 33.7 | Melanoma* | 0.0 | 2.0 |
| | | | (met) SK-MEL-5 | | |
| Kidney | 0.0 | 0.0 | Adipose | 6.7 | 7.2 |

[0853] TABLE 62
Panel 2D

| | Rel. Exp. (%) | Rel. Exp. (%) | | Rel. Exp. (%) | Rel. Exp. (%) |
|---|---|---|---|---|---|
| | Ag2261, Run | Ag2261, Run | | Ag2261, Run | Ag2261, Run |
| Tissue Name | 150811744 | 152887693 | Tissue Name | 150811744 | 152887693 |
| Normal Colon | 19.1 | 19.8 | Kidney Margin | 2.4 | 0.0 |
| | | | 8120608 | | |
| CC Well to Mod | 0.0 | 5.8 | Kidney Cancer | 14.6 | 7.3 |
| Diff (ODO3866) | | | 8120613 | | |
| CC Margin | 19.5 | 12.5 | Kidney Margin | 4.8 | 1.5 |
| (ODO3866) | | | 8120614 | | |
| CC Gr.2 | 3.8 | 1.4 | Kidney Cancer | 0.0 | 0.0 |
| rectosigmoid | | | 9010320 | | |
| (ODO3868) | | | | | |
| CC Margin | 2.6 | 5.1 | Kidney Margin | 0.0 | 0.0 |
| (ODO3868) | | | 9010321 | | |
| CC Mod Diff | 6.0 | 2.9 | Normal Uterus | 9.7 | 2.8 |
| (ODO3920) | | | | | |
| CC Margin | 23.8 | 6.4 | Uterine Cancer | 85.9 | 41.5 |
| (ODO3920) | | | 064011 | | |
| CC Gr.2 ascend | 9.3 | 2.2 | Normal Thyroid | 15.2 | 7.3 |
| colon (ODO3921) | | | | | |
| CC Margin | 16.8 | 11.7 | Thyroid Cancer | 0.0 | 3.0 |
| (ODO3921) | | | | | |
| CC from Partial | 2.4 | 0.0 | Thyroid Cancer | 1.9 | 1.2 |
| Hepatectomy | | | A302152 | | |
| (ODO4309) Mets | | | | | |
| Liver Margin | 2.6 | 0.0 | Thyroid Margin | 2.6 | 2.8 |
| (ODO4309) | | | A302153 | | |
| Colon mets to lung | 7.9 | 4.5 | Normal Breast | 16.2 | 2.7 |
| (OD04451-01) | | | | | |
| Lung Margin | 11.3 | 12.9 | Breast Cancer | 78.5 | 29.7 |
| (OD04451-02) | | | | | |
| Normal Prostate | 6.3 | 2.6 | Breast Cancer | 37.6 | 23.8 |
| 6546-1 | | | (OD04590-01) | | |
| Prostate Cancer | 17.8 | 7.3 | Breast Cancer | 100.0 | 24.5 |
| (OD04410) | | | Mets | | |
| | | | (OD04590-03) | | |
| Prostate Margin | 10.7 | 7.4 | Breast Cancer | 94.0 | 45.4 |
| (OD04410) | | | Metastasis | | |
| Prostate Cancer | 4.7 | 4.4 | Breast Cancer | 25.7 | 24.8 |
| (OD04720-01) | | | | | |
| Prostate Margin | 13.9 | 5.6 | Breast Cancer | 23.2 | 7.1 |
| (OD04720-02) | | | | | |
| Normal Lung | 36.6 | 14.3 | Breast Cancer | 33.0 | 7.5 |
| | | | 9100266 | | |
| Lung Met to | 1.0 | 0.0 | Breast Margin | 7.6 | 7.6 |
| Muscle | | | 9100265 | | |
| (ODO4286) | | | | | |
| Muscle Margin | 31.0 | 38.2 | Breast Cancer | 13.9 | 0.9 |
| (ODO4286) | | | A209073 | | |
| Lung Malignant | 81.8 | 100.0 | Breast Margin | 2.5 | 0.0 |
| Cancer | | | A2090734 | | |
| (OD03126) | | | | | |
| Lung Margin | 35.8 | 18.2 | Normal Liver | 0.0 | 0.0 |
| (OD03126) | | | | | |
| Lung Cancer | 57.0 | 39.5 | Liver Cancer | 0.0 | 0.0 |
| (OD04404) | | | | | |
| Lung Margin | 9.4 | 11.8 | Liver Cancer | 4.8 | 1.7 |
| (OD04404) | | | 1025 | | |
| Lung Cancer | 37.1 | 42.0 | Liver Cancer | 7.1 | 0.0 |
| (OD04565) | | | 1026 | | |
| Lung Margin | 22.7 | 9.3 | Liver Cancer | 4.8 | 0.0 |
| (OD04565) | | | 6004-T | | |
| Lung Cancer | 5.3 | 6.4 | Liver Tissue | 4.4 | 1.8 |
| (OD04237-01) | | | 6004-N | | |
| Lung Margin | 78.5 | 32.8 | Liver Cancer | 0.0 | 6.0 |
| (OD04237-02) | | | 6005-T | | |
| Ocular Mel Met to | 0.0 | 0.0 | Liver Tissue | 0.0 | 1.8 |
| Liver (ODO4310) | | | 6005-N | | |
| Liver Margin | 2.4 | 0.0 | Normal Bladder | 2.4 | 3.0 |
| (ODO4310) | | | | | |
| Melanoma | 13.0 | 0.0 | Bladder Cancer | 8.5 | 4.9 |
| Metastasis | | | | | |
| Lung Margin | 96.6 | 50.0 | Bladder Cancer | 17.0 | 11.8 |
| (OD04321) | | | | | |
| Normal Kidney | 0.0 | 0.0 | Bladder Cancer | 10.0 | 5.7 |
| | | | (OD04718-01) | | |
| Kidney Ca, | 0.0 | 0.0 | Bladder Normal | 19.3 | 27.5 |
| Nuclear grade 2 | | | Adjacent | | |
| (OD04338) | | | (OD04718-03) | | |
| Kidney Margin | 4.0 | 4.6 | Normal Ovary | 13.6 | 12.4 |
| (OD04338) | | | | | |
| Kidney Ca | 0.0 | 3.3 | Ovarian Cancer | 37.9 | 2.1 |
| Nuclear grade 1/2 | | | | | |
| (OD04339) | | | | | |
| Kidney Margin | 18.7 | 0.0 | Ovarian Cancer | 18.4 | 3.7 |
| (OD04339) | | | (OD04768-07) | | |
| Kidney Ca, Clear | 8.8 | 11.7 | Ovary Margin | 28.3 | 12.2 |
| cell type | | | (OD04768-08) | | |
| (OD04340) | | | | | |
| Kidney Margin | 0.0 | 2.0 | Normal | 48.3 | 17.3 |
| (OD04340) | | | Stomach | | |
| Kidney Ca, | 3.5 | 4.0 | Gastric Cancer | 0.0 | 0.0 |
| Nuclear grade 3 | | | 9060358 | | |
| (OD04348) | | | | | |
| Kidney Margin | 2.0 | 1.7 | Stomach | 9.9 | 3.0 |
| (OD04348) | | | Margin | | |
| | | | 9060359 | | |
| Kidney Cancer | 9.3 | 0.0 | Gastric Cancer | 20.7 | 10.4 |
| (OD04622-01) | | | 9060395 | | |
| Kidney Margin | 0.0 | 6.3 | Stomach | 10.0 | 12.2 |
| (OD04622-03) | | | Margin | | |
| | | | 9060394 | | |
| Kidney Cancer | 0.0 | 0.0 | Gastric Cancer | 8.7 | 1.5 |
| (OD04450-01) | | | 9060397 | | |
| Kidney Margin | 0.0 | 0.0 | Stomach | 7.5 | 6.2 |
| (OD04450-03) | | | Margin | | |
| | | | 9060396 | | |
| Kidney Cancer | 0.0 | 0.7 | Gastric Cancer | 10.7 | 4.8 |
| 8120607 | | | 064005 | | |

[0854] TABLE 63
Panel 4D

| | Rel. Exp. (%) | | Rel. Exp. (%) |
|---|---|---|---|
| | Ag2261, Run | | Ag2261, Run |
| Tissue Name | 152887762 | Tissue Name | 152887762 |
| Secondary Th1 act | 0.0 | HUVEC IL-1beta | 0.0 |
| Secondary Th2 act | 0.0 | HUVEC IFN gamma | 3.7 |
| Secondary Tr1 act | 0.0 | HUVEC TNF alpha + IFN | 0.0 |
| | | gamma | |
| Secondary Th1 rest | 0.0 | HUVEC TNF alpha + IL4 | 4.3 |
| Secondary Th2 rest | 0.0 | HUVEC IL-11 | 4.0 |
| Secondary Tr1 rest | 0.0 | Lung Microvascular EC none | 7.2 |
| Primary Th1 act | 0.0 | Lung Microvascular EC | 0.0 |
| | | TNF alpha + IL-1beta | |
| Primary Th2 act | 0.0 | Microvascular Dermal EC | 8.4 |
| | | none | |
| Primary Tr1 act | 0.0 | Microsvasular Dermal EC | 0.0 |
| | | TNF alpha + IL-1beta | |
| Primary Th1 rest | 0.0 | Bronchial epithelium | 0.0 |
| | | TNF alpha + IL1beta | |
| Primary Th2 rest | 0.0 | Small airway epithelium | 5.9 |
| | | none | |
| Primary Tr1 rest | 0.0 | Small airway epithelium | 24.3 |
| | | TNF alpha + IL-1beta | |
| CD45RA CD4 | 0.0 | Coronery artery SMC rest | 0.0 |
| lymphocyte act | | | |
| CD45RO CD4 | 0.0 | Coronery artery SMC | 0.0 |
| lymphocyte act | | TNF alpha + IL-1beta | |
| CD8 lymphocyte act | 0.0 | Astrocytes rest | 3.3 |
| Secondary CD8 | 0.0 | Astrocytes TNF alpha + IL- | 0.0 |
| lymphocyte rest | | 1beta | |
| Secondary CD8 | 1.6 | KU-812 (Basophil) rest | 0.0 |
| lymphocyte act | | | |
| CD4 lymphocyte none | 0.0 | KU-812 (Basophil) | 0.0 |
| | | PMA/ionomycin | |
| 2ry Th1/Th2/Tr1_anti- | 0.0 | CCD1106 (Keratinocytes) | 47.3 |
| CD95 CH11 | | none | |
| LAK cells rest | 3.5 | CCD1106 (Keratinocytes) | 9.0 |
| | | TNF alpha + IL-1beta | |
| LAK cells IL-2 | 0.0 | Liver cirrhosis | 32.8 |
| LAK cells IL-2 + IL-12 | 0.0 | Lupus kidney | 0.0 |
| LAK cells IL-2 + IFN | 0.0 | NCI-H292 none | 3.8 |
| gamma | | | |
| LAK cells IL-2 + IL-18 | 0.0 | NCI-H292 IL-4 | 8.0 |
| LAK cells | 26.1 | NCI-H292 IL-9 | 0.0 |
| PMA/ionomycin | | | |
| NK Cells IL-2 rest | 0.0 | NCI-H292 IL-13 | 13.8 |
| Two Way MLR 3 day | 0.0 | NCI-H292 IFN gamma | 16.2 |
| Two Way MLR 5 day | 0.0 | HPAEC none | 6.7 |
| Two Way MLR 7 day | 0.0 | HPAEC TNF alpha + IL-1 | 0.0 |
| | | beta | |
| PBMC rest | 0.0 | Lung fibroblast none | 7.6 |
| PBMC PWM | 0.0 | Lung fibroblast TNF alpha + | 3.1 |
| | | IL-1beta | |
| PBMC PHA-L | 0.0 | Lung fibroblast IL-4 | 4.3 |
| Ramos (B cell) none | 0.0 | Lung fibroblast IL-9 | 12.7 |
| Ramos (B cell) | 0.0 | Lung fibroblast IL-13 | 6.8 |
| ionomycin | | | |
| B lymphocytes PWM | 0.0 | Lung fibroblast IFN gamma | 30.4 |
| B lymphocytes CD40L | 3.1 | Dermal fibroblast CCD1070 | 0.0 |
| and IL-4 | | rest | |
| EOL-1 dbcAMP | 0.0 | Dermal fibroblast CCD1070 | 5.2 |
| | | TNF alpha | |
| EOL-1 dbcAMP | 3.5 | Dermal fibroblast CCD1070 | 0.0 |
| PMA/ionomycin | | IL-1beta | |
| Dendritic cells none | 0.0 | Dermal fibroblast IFN | 28.5 |
| | | gamma | |
| Dendritic cells LPS | 0.0 | Dermal fibroblast IL-4 | 42.9 |
| Dendritic cells anti- | 0.0 | IBD Colitis 2 | 2.2 |
| CD40 | | | |
| Monocytes rest | 0.0 | IBD Crohn's | 3.1 |
| Monocytes LPS | 0.0 | Colon | 100.0 |
| Macrophages rest | 0.0 | Lung | 36.3 |
| Macrophages LPS | 0.0 | Thymus | 0.0 |
| HUVEC none | 0.0 | Kidney | 4.0 |
| HUVEC starved | 17.4 | | |

[0855] Panel 1.3D Summary: Ag2261 The 88091010_EXT gene is expressed at moderate levels in a number of metabolic tissues, with highest overall expression seen in fetal skeletal muscle (CTs=30.4-31.8). The higher levels of expression in fetal skeletal muscle when compared to adult skeletal muscle suggest that the protein product encoded by the 88091010_EXT gene may be useful in treating muscular dystrophy, Lesch-Nyhan syndrome, myasthenia gravis and other conditions that result in weak or dystrophic muscle. This gene is also expressed in adipose, thyroid and heart. Since biologic cross-talk between adipose and thyroid is a component of some forms of obesity, this gene product may be a protein therapeutic for the treatment of metabolic disease, including obesity and Type 2 diabetes.

[0856] Panel 2D Summary: Ag2261 The expression of this gene was assessed in two independent runs on panel 2D. This gene is consistently expressed in samples of breast cancer, uterine cancer and lung cancer when compared to their respective normal adjacent tissue controls. Thus, the expression of this gene could be used to distinguish breast cancer, lung cancer or uterine cancer from their normal tissues. Moreover, therapeutic modulation of this gene, through the use of small molecule drugs, antibodies or protein therapeutics might be of use in the treatment of breast, lung or uterine cancer.

[0857] Panel 4D Summary: Ag 2261: This transcript is expressed at a low, but significant level in colon (CT 33.5). Low levels of expression of this transcript are also found in the lung, keratinocytes and dermal fibroblast. Thus, this transcript could be used as a marker for thymic, lung and skin tissues. The putative Wnt-14 encoded by this transcript may play an important role in the normal homeostasis of these tissues. Therefore, therapeutics designed with the protein encoded for by this transcript could be important for maintaining or restoring normal function to these organs during inflammation.

[0858] NOV9

[0859] Expression of NOV9 was assessed using the primer-probe set Ag2303, described in Table 64. Results of the RTQ-PCR runs are shown in Tables 65 and 66.

TABLE 64

Probe Name Ag2303

| | | | | |
|---|---|---|---|---|
| | | | | SEQ |
| | | | Start | ID |
| Primers | Sequences | Length | Position | NO: |

| | | | | |
|---|---|---|---|---|
| Forward | 5′-CATTGAGAGCGATAAGTTCA- | 22 | 510 | 181 |
| | CA-3′ | | | |
| Probe | TET-5′-AGAATGTGGAGCTCAA- | 26 | 548 | 182 |
| | CATCCACCTG-3′-TAMRA | | | |
| Reverse | 5′-GATGCACGCTGAAGTCATTC- | 20 | 579 | 183 |
| | 3′ | | | |

[0860] TABLE 65
Panel 1.3D

| | Rel. Exp. (%) | | Rel. Exp. (%) |
|---|---|---|---|
| | Ag2303, Run | | Ag2303, Run |
| Tissue Name | 167985232 | Tissue Name | 167985232 |
| Liver adenocarcinoma | 19.1 | Kidney (fetal) | 25.5 |
| Pancreas | 5.1 | Renal ca. 786-0 | 7.4 |
| Pancreatic ca. CAPAN 2 | 20.0 | Renal ca. A498 | 6.8 |
| Adrenal gland | 2.7 | Renal ca. RXF 393 | 15.5 |
| Thyroid | 2.3 | Renal ca. ACHN | 3.9 |
| Salivary gland | 7.2 | Renal ca. UO-31 | 6.3 |
| Pituitary gland | 5.0 | Renal ca. TK-10 | 16.4 |
| Brain (fetal) | 31.9 | Liver | 6.1 |
| Brain (whole) | 58.2 | Liver (fetal) | 6.7 |
| Brain (amygdala) | 33.9 | Liver ca. (hepatoblast) HepG2 | 11.7 |
| Brain (cerebellum) | 55.5 | Lung | 14.7 |
| Brain (hippocampus) | 23.3 | Lung (fetal) | 11.0 |
| Brain (substantia nigra) | 15.3 | Lung ca. (small cell) LX-1 | 36.6 |
| Brain (thalamus) | 21.9 | Lung ca. (small cell) NCI- | 15.0 |
| | | H69 | |
| Cerebral Cortex | 80.1 | Lung ca. (s.cell var.) SHP-77 | 60.7 |
| Spinal cord | 8.4 | Lung ca. (large cell)NCI- | 5.4 |
| | | H460 | |
| glio/astro U87-MG | 12.0 | Lung ca. (non-sm. cell) A549 | 14.3 |
| glio/astro U-118-MG | 10.8 | Lung ca. (non-s.cell) NCI- | 37.4 |
| | | H23 | |
| astrocytoma SW1783 | 15.5 | Lung ca. (non-s.cell) HOP-62 | 14.5 |
| neuro*; met SK-N-AS | 7.0 | Lung ca. (non-s.cl) NCI-H522 | 15.6 |
| astrocytoma SF-539 | 9.9 | Lung ca. (squam.) SW 900 | 16.2 |
| astrocytoma SNB-75 | 15.9 | Lung ca. (squam.) NCI-H596 | 33.2 |
| glioma SNB-19 | 8.7 | Mammary gland | 17.6 |
| glioma U251 | 20.7 | Breast ca.* (pl.ef) MCF-7 | 17.1 |
| glioma SF-295 | 7.9 | Breast ca.* (pl.ef) MDA-MB- | 6.7 |
| | | 231 | |
| Heart (Fetal) | 46.0 | Breast ca.* (pl. ef) T47D | 29.7 |
| Heart | 9.8 | Breast ca. BT-549 | 4.0 |
| Skeletal muscle (Fetal) | 30.6 | Breast ca. MDA-N | 10.4 |
| Skeletal muscle | 26.6 | Ovary | 7.9 |
| Bone marrow | 29.5 | Ovarian ca. OVCAR-3 | 13.3 |
| Thymus | 32.3 | Ovarian ca. OVCAR-4 | 14.3 |
| Spleen | 26.4 | Ovarian ca. OVCAR-5 | 62.4 |
| Lymph node | 26.2 | Ovarian ca. OVCAR-8 | 3.9 |
| Colorectal | 11.0 | Ovarian ca. IGROV- 1 | 6.2 |
| Stomach | 7.9 | Ovarian ca. (ascites) SK-OV-3 | 47.0 |
| Small intestine | 5.6 | Uterus | 5.0 |
| Colon ca. SW480 | 15.6 | Placenta | 3.2 |
| Colon ca.* SW620 (SW480 | 100.0 | Prostate | 8.0 |
| met) | | | |
| Colon ca. HT29 | 19.5 | Prostate ca.* (bone met) PC-3 | 21.5 |
| Colon ca. HCT-116 | 16.6 | Testis | 5.0 |
| Colon ca. CaCo-2 | 21.9 | Melanoma Hs688(A).T | 4.3 |
| CC Well to Mod Diff | 13.1 | Melanoma* (met) | 3.6 |
| (ODO3866) | | Hs688(B).T | |
| Colon ca. HCC-2998 | 33.9 | Melanoma UACC-62 | 7.0 |
| Gastric ca. (liver met) NCI-N87 | 18.8 | Melanoma M14 | 5.0 |
| Bladder | 7.2 | Melanoma LOX IMVI | 13.3 |
| Trachea | 4.0 | Melanoma* (met) SK-MEL-5 | 7.8 |
| Kidney | 7.6 | Adipose | 13.8 |

[0861] TABLE 66
Panel 4D

| | Rel. Exp. (%) | | Rel. Exp. (%) |
|---|---|---|---|
| | Ag2303, Run | | Ag2303, Run |
| Tissue Name | 151630338 | Tissue Name | 151630338 |
| Secondary Th1 act | 69.7 | HUVEC IL-1beta | 2.8 |
| Secondary Th2 act | 51.4 | HUVEC IFN gamma | 15.7 |
| Secondary Tr1 act | 66.0 | HUVEC TNF alpha + IFN | 7.2 |
| | | gamma | |
| Secondary Th1 rest | 24.5 | HUVEC TNF alpha + IL4 | 7.2 |
| Secondary Th2 rest | 28.9 | HUVEC IL-11 | 5.9 |
| Secondary Tr1 rest | 29.1 | Lung Microvascular EC none | 6.8 |
| Primary Th1 act | 53.2 | Lung Microvascular EC | 5.4 |
| | | TNF alpha + IL-1beta | |
| Primary Th2 act | 44.4 | Microvascular Dermal EC | 10.1 |
| | | none | |
| Primary Tr1 act | 66.0 | Microsvasular Dermal EC | 6.7 |
| | | TNF alpha + IL-1beta | |
| Primary Th1 rest | 89.5 | Bronchial epithelium | 7.2 |
| | | TNF alpha + IL1beta | |
| Primary Th2 rest | 66.0 | Small airway epithelium none | 4.1 |
| Primary Tr1 rest | 46.7 | small airway epithelium | 20.4 |
| | | TNF alpha + IL-1beta | |
| CD45RA CD4 lymphocyte act | 36.3 | Coronery artery SMC rest | 7.7 |
| CD45RO CD4 lymphocyte act | 55.5 | Coronery artery SMC | 6.1 |
| | | TNF alpha + IL-1beta | |
| CD8 lymphocyte act | 56.3 | Astrocytes rest | 4.4 |
| Secondary CD8 lymphocyte rest | 47.6 | Astrocytes TNF alpha + IL- | 3.0 |
| | | 1beta | |
| Secondary CD8 lymphocyte act | 48.0 | KU-812 (Basophil) rest | 17.3 |
| CD4 lymphocyte none | 15.2 | KU-812 (Basophil) | 31.2 |
| | | PMA/ionomycin | |
| 2ry Th1/Th2/Tr1_anti-CD95 | 41.2 | CCD1106 (Keratinocytes) | 11.8 |
| CH11 | | none | |
| LAK cells rest | 34.4 | CCD1106 (Keratinocytes) | 9.9 |
| | | TNF alpha + IL-1beta | |
| LAK cells IL-2 | 69.3 | Liver cirrhosis | 2.0 |
| LAK cells IL-2 + IL-12 | 55.9 | Lupus kidney | 2.1 |
| LAK cells IL-2 + IFN gamma | 63.3 | NCI-H292 none | 21.0 |
| LAK cells IL-2 + IL-18 | 57.0 | NCI-H292 IL-4 | 33.2 |
| LAK cells PMA/ionomycin | 9.6 | NCI-H292 IL-9 | 33.2 |
| NK Cells IL-2 rest | 47.6 | NCI-H292 IL-13 | 20.9 |
| Two Way MLR 3 day | 38.7 | NCI-H292 IFN gamma | 25.0 |
| Two Way MLR 5 day | 39.5 | HPAEC none | 8.2 |
| Two Way MLR 7 day | 42.0 | HPAEC TNF alpha + IL-1 | 8.6 |
| | | beta | |
| PBMC rest | 21.5 | Lung fibroblast none | 5.9 |
| PBMC PWM | 100.0 | Lung fibroblast TNF alpha + | 6.4 |
| | | IL-1beta | |
| PBMC PHA-L | 73.7 | Lung fibroblast IL-4 | 12.2 |
| Ramos (B cell) none | 54.3 | Lung fibroblast IL-9 | 9.9 |
| Ramos (B cell) ionomycin | 78.5 | Lung fibroblast IL-13 | 9.6 |
| B lymphocytes PWM | 90.1 | Lung fibroblast IFN gamma | 11.6 |
| B lymphocytes CD40L and IL-4 | 53.6 | Dermal fibroblast CCD1070 | 12.5 |
| | | rest | |
| EOL-1 dbcAMP | 57.4 | Dermal fibroblast CCD1070 | 67.8 |
| | | TNF alpha | |
| EOL-1 dbcAMP | 18.8 | Dermal fibroblast CCD1070 | 9.7 |
| PMA/ionomycin | | IL-1beta | |
| Dendritic cells none | 22.1 | Dermal fibroblast IFN gamma | 5.5 |
| Dendritic cells LPS | 15.9 | Dermal fibroblast IL-4 | 7.4 |
| Dendritic cells anti-CD40 | 22.2 | IBD Colitis 2 | 2.0 |
| Monocytes rest | 45.4 | IBD Crohn's | 1.4 |
| Monocytes LPS | 17.3 | Colon | 20.4 |
| Macrophages rest | 36.1 | Lung | 14.0 |
| Macrophages LPS | 18.0 | Thymus | 10.6 |
| HUVEC none | 13.7 | Kidney | 31.6 |
| HUVEC starved | 19.8 | | |

[0862] Panel 1.3D Summary: Ag2303

[0863] NOV9 is widely expressed across the panel, with highest expression in a colon cancer cell line SW620 (CT=26.4). Of note is the difference in expression between the related colon cancer cell lines SW620 and SW480. SW480 represents the primary lesion from a patient with colon cancer, while SW620 represents a metastasis from the same patient. The difference in expression of this gene between the SW620 and SW480 cell lines indicates that it could be used to distingush these cells, or others like them. Moreover, therapeutic modulation of NOV9, through the use of small molecule drugs, antibodies or protein therapeutics, may be effective in the treatment of metastatic colon cancer.

[0864] Among tissues with metabolic function, NOV9 is moderately expressed in the pancreas, adrenal, thyroid, pituitary, adipose, adult and fetal heart, and adult and fetal liver. This expression profile suggests that the NOV9 product may be an important small molecule target for the treatment of metabolic disease in any or all of these tissues, including obesity and diabetes.

[0865] NOV9, which encodes a beta-adrenergic receptor kinase, also shows high expression in all regions of the brain examined, especially in the cerebral cortex (CT=26.7) The beta adrenergic receptors have been shown to play a role in memory formation and in clinical depression. Since many current anti-depressants produce undesired side effects as a result of non-specific binding (to other receptors), this gene is therefore an excellent small molecule target for the treatment of clinical depression without side effects. Furthermore, the role of beta adrenergic receptors in memory consolidation suggests that the NOV9 gene product would also be useful as a small molecule target for the treatment of Alzheimer's disease, vascular dementia, or any memory loss disorder.

[0866] References:

[0867] 1. Feighner J P. Mechanism of action of antidepressant medications. J Clin Psychiatry 1999;60 Suppl 4:4-11; discussion 12-3

[0868] The psychopharmacology of depression is a field that has evolved rapidly in just under 5 decades. Early antidepressant medications—tricyclic antidepressants (TCAs) and monoamine oxidase inhibitors (MAOIs)—were discovered through astute clinical observations. These first-generation medications were effective because they enhanced serotonergic or noradrenergic mechanisms or both. Unfortunately, the TCAs also blocked histaminic, cholinergic, and alpha I -adrenergic receptor sites, and this action brought about unwanted side effects such as weight gain, dry mouth, constipation, drowsiness, and dizziness. MAOIs can interact with tyramine to cause potentially lethal hypertension and present potentially dangerous interactions with a number of medications and over-the-counter drugs. The newest generation of antidepressants, including the single-receptor selective serotonin reuptake inhibitors (SSRIs) and multiple-receptor antidepressants venlafaxine, mirtazapine, bupropion, trazodone, and nefazodone, target one or more specific brain receptor sites without, in most cases, activating unwanted sites such as histamine and acetylcholine. This paper discusses the new antidepressants, particularly with regard to mechanism of action, and looks at future developments in the treatment of depression.

[0869] 2. Ferry B, McGaugh J L. Role of amygdala norepinephrine in mediating stress hormone regulation of memory storage. Acta Pharmacol Sin Jun. 21, 2000;(6):481-93

[0870] There is extensive evidence indicating that the noradrenergic system of the amygdala, particularly the basolateral nucleus of the amygdala (BLA), is involved in memory consolidation. This article reviews the central hypothesis that stress hormones released during emotionally arousing experiences activate noradrenergic mechanisms in the BLA, resulting in enhanced memory for those events. Findings from experiments using rats have shown that the memory-modulatory effects of the adrenocortical stress hormones epinephrine and glucocorticoids involve activation of beta-adrenoceptors in the BLA. In addition, both behavioral and microdialysis studies have shown that the noradrenergic system of the BLA also mediates the influences of other neuromodulatory systems such as opioid peptidergic and GABAergic systems on memory storage. Other findings indicate that this stress hormone-induced activation of noradrenergic mechanisms in the BLA regulates memory storage in other brain regions.

[0871] Panel 4D Summary: Ag2303

[0872] NOV9, a beta-adrenergic receptor kinase homolog, is highly expressed (CTs 26-29) in a wide range of cells that play a significance role in the immune response. Highest expression of this gene is found in activated B and T cells. Therefore, inhibition of the function of the protein encoded by NOV9 with a small molecule drug may block the functions of B cells or T cells and could be beneficial in the treatment of patients suffering from autoimmune and inflammatory diseases such as asthma, allergies, inflammatory bowel disease, lupus erythematosus, or rheumatoid arthritis.

[0873] NOV10

[0874] Expression of NOV10 was assessed using the primer-probe set Ag231 1, described in Table 67. Results of the RTQ-PCR runs are shown in Tables 68, 69, 70 and 71.

TABLE 67

Probe Name Ag2311

| | | | | |
|---|---|---|---|---|
| | | | | SEQ |
| | | | Start | ID |
| Primers | Sequences | Length | Position | NO: |

| | | | | |
|---|---|---|---|---|
| Forward | 5′-CTCTGGGGACTCCTAATTTC- | 22 | 2913 | 184 |
| | TG-3′ | | | |
| Probe | TET-5′-CCCAGCCTAAAGCAGG- | 26 | 2939 | 185 |
| | GATCAGTCTT-3′-TAMRA | | | |
| Reverse | 5′-TCCAAGGATTTATTCCACAA- | 22 | 2966 | 186 |
| | GA-3′ | | | |

[0875] TABLE 68
CNS_neurodegeneration_v1.0

| | Rel. Exp. (%) | | Rel. Exp. (%) |
|---|---|---|---|
| | Ag2311, Run | | Ag2311, Run |
| Tissue Name | 208253895 | Tissue Name | 208253895 |
| AD 1 Hippo | 33.4 | Control (Path) 3 Temporal Ctx | 13.4 |
| AD 2 Hippo | 46.3 | Control (Path) 4 Temporal Ctx | 44.8 |
| AD 3 Hippo | 12.9 | AD 1 Occipital Ctx | 36.1 |
| AD 4 Hippo | 15.4 | AD 2 Occipital Ctx (Missing) | 0.0 |
| AD 5 Hippo | 87.7 | AD 3 Occipital Ctx | 10.5 |
| AD 6 Hippo | 41.2 | AD 4 Occipital Ctx | 23.2 |
| Control 2 Hippo | 34.4 | AD 5 Occipital Ctx | 40.1 |
| Control 4 Hippo | 29.7 | AD 5 Occipital Ctx | 28.3 |
| Control (Path) 3 Hippo | 13.0 | Control 1 Occipital Ctx | 8.8 |
| AD 1 Temporal Ctx | 39.2 | Control 2 Occipital Ctx | 57.4 |
| AD 2 Temporal Ctx | 46.7 | Control 3 Occipital Ctx | 32.3 |
| AD 3 Temporal Ctx | 12.2 | Control 4 Occipital Ctx | 13.6 |
| AD 4 Temporal Ctx | 42.9 | Control (Path) 1 Occipital Ctx | 67.4 |
| AD 5 Inf Temporal Ctx | 100.0 | Control (Path) 2 Occipital Ctx | 26.8 |
| AD 5 Sup Temporal Ctx | 57.8 | Control (Path) 3 Occipital Ctx | 12.5 |
| AD 6 Inf Temporal Ctx | 48.3 | Control (Path) 4 Occipital Ctx | 36.6 |
| AD 6 Sup Temporal Ctx | 42.6 | Control 1 Parietal Ctx | 14.1 |
| Control 1 Temporal Ctx | 15.7 | Control 2 Parietal Ctx | 71.7 |
| Control 2 Temporal Ctx | 37.4 | Control 3 Parietal Ctx | 29.1 |
| Control 3 Temporal Ctx | 25.5 | Control (Path) 1 Parietal Ctx | 39.5 |
| Control 3 Temporal Ctx | 23.5 | Control (Path) 2 Parietal Ctx | 31.2 |
| Control (Path) 1 Temporal Ctx | 59.5 | Control (Path) 3 Parietal Ctx | 11.6 |
| Control (Path) 2 Temporal Ctx | 35.8 | Control (Path) 4 Parietal Ctx | 58.2 |

[0876] TABLE 69
Panel 1.3D

| | Rel. Exp. (%) | | Rel. Exp. (%) |
|---|---|---|---|
| | Ag2311, Run | | Ag2311, Run |
| Tissue Name | 165627680 | Tissue Name | 165627680 |
| Liver adenocarcinoma | 1.7 | Kidney (fetal) | 6.7 |
| Pancreas | 10.5 | Renal ca. 786-0 | 1.3 |
| Pancreatic ca. CAPAN 2 | 5.4 | Renal ca. A498 | 6.5 |
| Adrenal gland | 22.2 | Renal ca. RXF 393 | 3.3 |
| Thyroid | 21.5 | Renal ca. ACHN | 0.9 |
| Salivary gland | 10.6 | Renal ca. UO-31 | 1.1 |
| Pituitary gland | 24.7 | Renal ca. TK-10 | 1.3 |
| Brain (fetal) | 15.0 | Liver | 7.5 |
| Brain (whole) | 23.7 | Liver (fetal) | 10.8 |
| Brain (amygdala) | 24.7 | Liver ca. (hepatoblast) HepG2 | 2.0 |
| Brain (cerebellum) | 24.5 | Lung | 27.5 |
| Brain (hippocampus) | 35.1 | Lung (fetal) | 7.5 |
| Brain (substantia nigra) | 100.0 | Lung ca. (small cell) LX-1 | 4.6 |
| Brain (thalamus) | 27.7 | Lung ca. (small cell) NCI- | 0.0 |
| | | H69 | |
| Cerebral Cortex | 9.9 | Lung ca. (s.cell var.) SHP-77 | 5.4 |
| Spinal cord | 32.5 | Lung ca. (large cell) NCI- | 19.1 |
| | | H460 | |
| glio/astro U87-MG | 4.2 | Lung ca. (non-sm. cell) A549 | 3.2 |
| glio/astro U-118-MG | 9.2 | Lung ca. (non-s.cell) NCI- | 5.1 |
| | | H23 | |
| astrocytoma SW1783 | 3.7 | Lung ca. (non-s.cell) HOP-62 | 3.5 |
| neuro*; met SK-N-AS | 12.2 | Lung ca. (non-s.cl) NCI-H522 | 1.4 |
| astrocytoma SF-539 | 4.1 | Lung ca. (squam.) SW 900 | 1.9 |
| astrocytoma SNB-75 | 3.7 | Lung ca. (squam.) NCI-H596 | 0.3 |
| glioma SNB-19 | 5.8 | Mammary gland | 18.0 |
| glioma U251 | 28.9 | Breast ca.* (pl.ef) MCF-7 | 6.1 |
| glioma SF-295 | 4.5 | Breast ca.* (pl.ef) MDA-MB- | 3.8 |
| | | 231 | |
| Heart (Fetal) | 5.4 | Breast ca.* (pl.ef) T47D | 6.3 |
| Heart | 12.3 | Breast ca. BT-549 | 1.0 |
| Skeletal muscle (Fetal) | 4.6 | Breast ca. MDA-N | 2.1 |
| Skeletal muscle | 22.8 | Ovary | 2.0 |
| Bone marrow | 15.1 | Ovarian ca. OVCAR-3 | 4.3 |
| Thymus | 17.9 | Ovarian ca. OVCAR-4 | 1.8 |
| Spleen | 21.9 | Ovarian ca. OVCAR-5 | 9.8 |
| Lymph node | 27.7 | Ovarian ca. OVCAR-8 | 1.0 |
| Colorectal | 3.0 | Ovarian ca. IGROV-1 | 0.8 |
| Stomach | 12.9 | Ovarian ca. (ascites) SK-OV-3 | 2.8 |
| Small intestine | 66.4 | Uterus | 29.3 |
| Colon ca. SW480 | 2.4 | Placenta | 8.2 |
| Colon ca.* SW620 (SW480 | 4.1 | Prostate | 28.7 |
| met) | | | |
| Colon ca. HT29 | 2.4 | Prostate ca.* (bone met) PC-3 | 1.7 |
| Colon ca. HCT-116 | 2.7 | Testis | 38.7 |
| Colon ca. CaCo-2 | 3.0 | Melanoma Hs688(A).T | 1.3 |
| CC Well to Mod Diff | 5.8 | Melanoma* (met) | 2.0 |
| (ODO3866) | | Hs688(B).T | |
| Colon ca. HCC-2998 | 3.5 | Melanoma UACC-62 | 2.9 |
| Gastric ca. (liver met) NCI-N87 | 13.8 | Melanoma M14 | 11.0 |
| Bladder | 4.5 | Melanoma LOX IMVI | 0.2 |
| Trachea | 13.1 | Melanoma* (met) SK-MEL-5 | 2.9 |
| Kidney | 14.7 | Adipose | 9.7 |

[0877] TABLE 70
Panel 2.2

| | Rel. Exp. (%) | | Rel. Exp. (%) |
|---|---|---|---|
| | Ag2311, Run | | Ag2311, Run |
| Tissue Name | 174370590 | Tissue Name | 174370590 |
| Normal Colon | 9.4 | Kidney Margin (OD04348) | 100.0 |
| Colon cancer (OD06064) | 1.2 | Kidney malignant cancer | 9.3 |
| | | (OD06204B) | |
| Colon Margin (OD06064) | 0.6 | Kidney normal adjacent tissue | 17.6 |
| | | (OD06204E) | |
| Colon cancer (OD06159) | 1.5 | Kidney Cancer (OD04450-01) | 41.2 |
| Colon Margin (OD06159) | 5.5 | Kidney Margin (OD04450-03) | 14.9 |
| Colon cancer (OD06297-04) | 1.1 | Kidney Cancer 8120613 | 2.9 |
| Colon Margin (OD06297-015) | 9.6 | Kidney Margin 8120614 | 9.8 |
| CC Gr.2 ascend colon | 9.8 | Kidney Cancer 9010320 | 6.7 |
| (ODO3921) | | | |
| CC Margin (ODO3921) | 3.6 | Kidney Margin 9010321 | 5.4 |
| Colon cancer metastasis | 5.5 | Kidney Cancer 8120607 | 6.3 |
| (OD06104) | | | |
| Lung Margin (OD06104) | 1.2 | Kidney Margin 8120608 | 6.3 |
| Colon mets to lung (OD04451- | 22.2 | Normal Uterus | 17.6 |
| 01) | | | |
| Lung Margin (OD04451-02) | 12.0 | Uterine Cancer 064011 | 11.2 |
| Normal Prostate | 6.2 | Normal Thyroid | 3.3 |
| Prostate Cancer (OD04410) | 4.3 | Thyroid Cancer | 11.1 |
| Prostate Margin (OD04410) | 9.6 | Thyroid Cancer A302152 | 33.4 |
| Normal Ovary | 17.3 | Thyroid Margin A302153 | 9.7 |
| Ovarian cancer (OD06283-03) | 6.7 | Normal Breast | 28.7 |
| Ovarian Margin (OD06283-07) | 8.8 | Breast Cancer | 9.7 |
| Ovarian Cancer | 10.7 | Breast Cancer | 14.9 |
| Ovarian cancer (OD06145) | 4.2 | Breast Cancer (OD04590-01) | 32.5 |
| Ovarian Margin (OD06145) | 29.5 | Breast Cancer Mets | 12.2 |
| | | (OD04590-03) | |
| Ovarian cancer (OD06455-03) | 7.9 | Breast Cancer Metastasis | 25.5 |
| Ovarian Margin (OD06455-07) | 2.4 | Breast Cancer | 15.9 |
| Normal Lung | 26.2 | Breast Cancer 9100266 | 1.8 |
| Invasive poor diff. lung adeno | 8.3 | Breast Margin 9100265 | 1.6 |
| (ODO4945-01 | | | |
| Lung Margin (ODO4945-03) | 6.0 | Breast Cancer A209073 | 2.1 |
| Lung Malignant Cancer | 16.0 | Breast Margin A2090734 | 26.6 |
| (OD03126) | | | |
| Lung Margin (OD03126) | 5.5 | Breast cancer (OD06083) | 25.0 |
| Lung Cancer (OD05014A) | 7.0 | Breast cancer node metastasis | 27.5 |
| | | (OD06083) | |
| Lung Margin (OD05014B) | 7.3 | Normal Liver | 23.7 |
| Lung cancer (OD06081) | 20.4 | Liver Cancer 1026 | 2.7 |
| Lung Margin (OD06081) | 12.3 | Liver Cancer 1025 | 29.5 |
| Lung Cancer (OD04237-01) | 9.5 | Liver Cancer 6004-T | 24.0 |
| Lung Margin (OD04237-02) | 18.4 | Liver Tissue 6004-N | 23.2 |
| Ocular Mel Met to Liver | 14.1 | Liver Cancer 6005-T | 9.0 |
| (ODO4310) | | | |
| Liver Margin (ODO4310) | 15.0 | Liver Tissue 6005-N | 51.1 |
| Melanoma Metastasis | 12.5 | Liver Cancer | 31.4 |
| Lung Margin (OD04321) | 4.4 | Normal Bladder | 13.5 |
| Normal Kidney | 20.4 | Bladder Cancer | 6.4 |
| Kidney Ca, Nuclear grade 2 | 63.3 | Bladder Cancer | 11.3 |
| (OD04338) | | | |
| Kidney Margin (OD04338) | 11.5 | Normal Stomach | 48.6 |
| Kidney Ca Nuclear grade 1/2 | 46.3 | Gastric Cancer 9060397 | 5.6 |
| (OD04339) | | | |
| Kidney Margin (OD04339) | 17.4 | Stomach Margin 9060396 | 4.0 |
| Kidney Ca, Clear cell type | 24.8 | Gastric Cancer 9060395 | 4.0 |
| (OD04340) | | | |
| Kidney Margin (OD04340) | 17.0 | Stomach Margin 9060394 | 9.1 |
| Kidney Ca, Nuclear grade 3 | 3.1 | Gastric Cancer 064005 | 7.9 |
| (OD04348) | | | |

[0878] TABLE 71
Panel 4D

| | Rel. Exp. (%) | | Rel. Exp. (%) |
|---|---|---|---|
| | Ag2311, Run | | Ag2311, Run |
| Tissue Name | 158928074 | Tissue Name | 158928074 |
| Secondary Th1 act | 29.3 | HUVEC IL-1beta | 6.1 |
| Secondary Th2 act | 33.2 | HUVEC IFN gamma | 37.6 |
| Secondary Tr1 act | 45.7 | HUVEC TNF alpha + IFN | 36.3 |
| | | gamma | |
| Secondary Th1 rest | 17.3 | HUVEC TNF alpha + IL4 | 34.9 |
| Secondary Th2 rest | 19.2 | HUVEC IL-11 | 17.8 |
| Secondary Tr1 rest | 27.7 | Lung Microvascular EC none | 30.4 |
| Primary Th1 act | 36.9 | Lung Microvascular EC | 43.8 |
| | | TNF alpha + IL-1beta | |
| Primary Th2 act | 36.9 | Microvascular Dermal EC | 39.5 |
| | | none | |
| Primary Tr1 act | 45.7 | Microsvasular Dermal EC | 27.4 |
| | | TNF alpha + IL-1beta | |
| Primary Th1 rest | 38.7 | Bronchial epithelium | 1.2 |
| | | TNF alpha + IL1beta | |
| Primary Th2 rest | 27.0 | Small airway epithelium none | 6.2 |
| Primary Tr1 rest | 37.6 | Small airway epithelium | 20.0 |
| | | TNF alpha + IL-1beta | |
| CD45RA CD4 lymphocyte act | 17.2 | Coronery artery SMC rest | 9.5 |
| CD45RO CD4 lymphocyte act | 24.0 | Coronery artery SMC | 7.7 |
| | | TNF alpha + IL-1beta | |
| CD8 lymphocyte act | 21.9 | Astrocytes rest | 10.9 |
| Secondary CD8 lymphocyte rest | 26.2 | Astrocytes TNF alpha + IL- | 9.9 |
| | | 1beta | |
| Secondary CD8 lymphocyte act | 17.4 | KU-812 (Basophil) rest | 40.1 |
| CD4 lymphocyte none | 5.9 | KU-812 (Basophil) | 52.9 |
| | | PMA/ionomycin | |
| 2ry Th1/Th2/Tr1_anti-CD95 | 19.8 | CCD1106 (Keratinocytes) | 9.6 |
| CH11 | | none | |
| LAK cells rest | 32.8 | CCD1106 (Keratinocytes) | 0.6 |
| | | TNF alpha + IL-1beta | |
| LAK cells IL-2 | 23.3 | Liver cirrhosis | 10.8 |
| LAK cells IL-2 + IL-12 | 31.0 | Lupus kidney | 6.9 |
| LAK cells IL-2 + IFN gamma | 27.5 | NCI-H292 none | 65.1 |
| LAK cells IL-2 + IL-18 | 38.7 | NCI-H292 IL-4 | 65.1 |
| LAK cells PMA/ionomycin | 17.4 | NCI-H292 IL-9 | 71.7 |
| NK Cells IL-2 rest | 28.5 | NCI-H292 IL-13 | 41.2 |
| Two Way MLR 3 day | 36.9 | NCI-H292 IFN gamma | 43.8 |
| Two Way MLR 5 day | 19.5 | HPAEC none | 30.8 |
| Two Way MLR 7 day | 16.4 | HPAEC TNF alpha + IL-1 | 16.8 |
| | | beta | |
| PBMC rest | 23.5 | Lung fibroblast none | 25.7 |
| PBMC PWM | 35.1 | Lung fibroblast TNF alpha + | 9.0 |
| | | IL-1beta | |
| PBMC PHA-L | 17.8 | Lung fibroblast IL-4 | 43.5 |
| Ramos (B cell) none | 21.8 | Lung fibroblast IL-9 | 27.4 |
| Ramos (B cell) ionomycin | 37.4 | Lung fibroblast IL-13 | 29.1 |
| B lymphocytes PWM | 72.7 | Lung fibroblast LFN gamma | 23.5 |
| B lymphocytes CD40L and IL-4 | 66.0 | Dermal fibroblast CCD1070 | 42.3 |
| | | rest | |
| EOL-1 dbcAMP | 35.8 | Dermal fibroblast CCD1070 | 62.9 |
| | | TNF alpha | |
| EOL-1 dbcAMP | 38.4 | Dermal fibroblast CCD1070 | 28.3 |
| PMA/ionomycin | | IL-1beta | |
| Dendritic cells none | 59.0 | Dermal fibroblast IFN gamma | 18.3 |
| Dendritic cells LPS | 32.5 | Dermal fibroblast IL-4 | 33.2 |
| Dendritic cells anti-CD40 | 33.4 | IBD Colitis 2 | 5.3 |
| Monocytes rest | 42.9 | IBD Crohn's | 5.2 |
| Monocytes LPS | 25.0 | Colon | 27.5 |
| Macrophages rest | 42.3 | Lung | 14.5 |
| Macrophages LPS | 18.7 | Thymus | 47.6 |
| HUVEC none | 37.9 | Kidney | 100.0 |
| HUVEC starved | 40.1 | | |

[0879] CNS_Neurodegeneration_v1.0 Summary: Ag2311

[0880] NOV10 does not show differential expression between Alzheimer's diseased brains and control brains. However, this panel confirms the expression of this gene in the brains of an independent group of patients. Please see panel 1.3d for discussion of utility in the central nervous system.

[0881] Panel 1.3D Summary: Ag2311

[0882] NOV10, an alpha mannosidase isoform, is expressed at moderate levels in all regions of the brain examined, with highest expression in the substantia nigra (CT=29.3). In the brain, alpha mannosidase has been implicated in the processes of myelination and axon growth. Therefore, therapeutic modulation of this gene or its protein product may be of use in the treatment of disorders where myelination has been compromised such as multiple sclerosis, and schizophrenia. In addition, the protein encoded by NOV10 could be useful in clinical situations where increased axonal growth is desired including spinal cord or brain trauma, stroke, or peripheral nerve injury.

[0883] NOV10 gene is moderately expressed (CT values=31-34) in a variety of metabolic tissues including pancreas, adrenal, thyroid, pituitary, adult and fetal heart, adult and fetal liver, adult and fetal skeletal muscle, and adipose. This expression profile suggests that the protein encoded by the NOV10 may be an important small molecule target for the treatment of metabolic disease in any or all of these tissues, including obesity and diabetes.

[0884] The expression of this gene appears to be generally associated with normal tissues when compared to cell lines. Of note was the difference in expression in normal prostate when compared to the prostate cancer cell line (PC-3). Thus, NOV10 could be used to distinguish this sample on the panel from other samples or to distinguish normal prostate from prostate cancer. Moreover, therapeutic modulation of this gene, through the use of small molecule drugs, antibodies or protein therapetics, might be of use in the treatment of prostate cancer.

[0885] References:

[0886] 1. Vite C H, McGowan J C, Braund K G, Drobatz K J, Glickson J D, Wolfe J H, Haskins M E. Histopathology, electrodiagnostic testing, and magnetic resonance imaging show significant peripheral and central nervous system myelin abnormalities in the cat model of alpha-mannosidosis. J Neuropathol Exp Neurol August 2001; 60(8):817-28

[0887] Alpha-mannosidosis is a disease caused by the deficient activity of alpha-mannosidase, a lysosomal hydrolase involved in the degradation of glycoproteins. The disease is characterized by the accumulation of mannose-rich oligosaccharides within lysosomes. The purpose of this study was to characterize the peripheral nervous system (PNS) and central nervous system (CNS) myelin abnormalities in cats from a breeding colony with a uniform mutation in the gene encoding alpha-mannosidase. Three affected cats and 3 normal cats from 2 litters were examined weekly from 4 to 18 wk of age. Progressively worsening neurological signs developed in affected cats that included tremors, loss of balance, and nystagmus. In the PNS, affected cats showed slow motor nerve conduction velocity and increased F-wave latency. Single nerve fiber teasing revealed significant demyelination/remyelination in affected cats. Mean G-ratios of nerves showed a significant increase in affected cats compared to normal cats. Magnetic resonance imaging of the CNS revealed diffuse white matter signal abnormalities throughout the brain of affected cats. Quantitative magnetization transfer imaging showed a 8%-16% decrease in the magnetization transfer ratio in brain white matter of affected cats compared to normal cats, consistent with myelin abnormalities. Histology confirmed myelin loss throughout the cerebrum and cerebellum. Thus, histology, electrodiagnostic testing, and magnetic resonance imaging identified significant myelination abnormalities in both the PNS and CNS that have not been described previously in alpha-mannosidosis.

[0888] 2. Zmuda J F, Rivas R J. The Golgi apparatus and the centrosome are localized to the sites of newly emerging axons in cerebellar granule neurons in vitro. Cell Motil Cytoskeleton 1998;41(1):18-38

[0889] Cultured cerebellar granule neurons develop their characteristic axonal and dendritic morphologies in a series of discrete temporal steps highly similar to those observed in situ, initially extending a single process, followed by the extension of a second process from the opposite pole of the cell, both of which develop into axons to generate a bipolar morphology. A mature morphology is attained following the outgrowth of multiple, short dendrites [Powell et al., 1997: J. Neurobiol. 32:223-236]. To determine the relationship between the localization of the Golgi apparatus, the site of microtubule nucleation (the centrosome), and the sites of initial and secondary axonal extension, the intracellular positioning of the Golgi and centrosome was observed during the differentiation of postnatal mouse granule neurons in vitro. The Golgi was labeled using the fluorescent lipid analogue, C5-DMB-Ceramide, or by indirect immunofluorescence using antibodies against the Golgi resident protein, alpha-mannosidase II. At 1-2 days in vitro (DIV), the Golgi was positioned at the base of the initial process in 99% of unipolar cells observed. By 3 DIV, many cells began the transition to a bipolar morphology by extending a short neurite from the pole of the cell opposite to the initial process. The Golgi was observed at this site of secondary outgrowth in 92% of these “transitional” cells, suggesting that the Golgi was repositioned from the base of the initial process to the site of secondary neurite outgrowth. As the second process elongated and the cells proceeded to the bipolar stage of development, or at later stages when distinct axonal and somatodendritic domains had been established, the Golgi was not consistently positioned at the base of either axons or dendrites, and was most often found at sites on the plasma membrane from which no processes originated. To determine the location of the centrosome in relation to the Golgi during development, granule neurons were labeled with antibodies against gamma-tubulin and optically sectioned using confocal microscopy. The centrosome was consistently co-localized with the Golgi during all stages of differentiation, and also appeared to be repositioned to the base of the newly emerging axon during the transition from a unipolar to a bipolar morphology. These findings indicate that during the early stages of granule cell axonal outgrowth, the Golgi-centrosome is positioned at the base of the initial axon and is then repositioned to the base of the newly emerging secondary axon. Such an intracellular reorientation of these organelles may be important in maintaining the characteristic developmental pattern of granule neurons by establishing the polarized microtubule network and the directed flow of membranous vesicles required for initial axonal elaboration

[0890] Panel 2.2 Summary: Ag2311

[0891] The expression of this gene is highest in a sample derived from normal kidney tissue adjacent to a kidney cancer. Furthermore, there appears to be substantial expression in normal stomach, normal liver adjacent to a cancer, normal breast adjacent to a cancer and normal ovary adjacent to a cancer. Thus, the expression of this gene could be used to distinguish these normal tissues from their malignant counterparts. Moreover, therapeutic modulation of this gene, through the use of small molecule durgs, antibodies or protein therapeutics might be of use in the treatment of kidney, liver, breast or ovarian cancer.

[0892] Panel 4D Summary: Ag2311

[0893] NOV10 is modestly expressed (CT values=30-33) in a wide variety of immune cell types and tissues. The highest expression of this gene is found in B cells stimulated with PWM and anti-CD40, where stimulation normally leads to the production of immunoglobulin (Ig) and Ig switching. High levels of expression of this transcript are also found in a pulmonary muco-epidermoid cell line (H292) treated with Th2 cytokines. These findings suggest that the NOV10 product may be important in the pathogenesis, and/or treatment of autoimmune diseases such as lupus erythematosus, rheumatoid arthritis, inflammatory bowel disease, allergies which are associated with hyper IgE production, and lung inflammatory diseases such as asthma and emphysema. In addition, the high expression of this gene in the kidney suggests that the protein encoded by this transcript may be involved in normal tissue/cellular functions particularly in the kidney.

[0894] NOV11a, NOV11b

[0895] Expression of NOV11a and NOV11b was assessed using the primer-probe set Ag3670, described in Table 72. Results of the RTQ-PCR runs are shown in Tables 73 and 74.

TABLE 72

Probe Name Ag3670

| | | | | |
|---|---|---|---|---|
| | | | | SEQ |
| | | | Start | ID |
| Primers | Sequences | Length | Position | NO: |

| | | | | |
|---|---|---|---|---|
| Forward | 5′-ACGAGGTCTTCATCAAGCTG- | 20 | 705 | 187 |
| | 3′ | | | |
| Probe | TET-5′-CACCAACAAGTACAGC- | 26 | 751 | 188 |
| | ACCTTCTCCG-3′-TAMRA | | | |
| Reverse | 5′-CAGTCGGGGTAGATGATGAA- | 20 | 779 | 189 |
| | 3′ | | | |

[0896] TABLE 73
General_screening_panel_v1.4

| | Rel. | Rel. | | Rel. | Rel. |
|---|---|---|---|---|---|
| | Exp. (%) | Exp. (%) | | Exp. (%) | Exp. (%) |
| | Ag3670, | Ag3670, | | Ag3670, | Ag3670, |
| | Run | Run | | Run | Run |
| Tissue Name | 216517130 | 222735036 | Tissue Name | 216517130 | 222735036 |
| Adipose | 0.2 | 0.4 | Renal ca. TK-10 | 2.1 | 1.1 |
| Melanoma* | 0.0 | 0.0 | Bladder | 0.4 | 0.0 |
| Hs688(A).T | | | | | |
| Melanoma* | 0.0 | 0.0 | Gastric ca. (liver met.) | 0.8 | 0.4 |
| Hs688(B).T | | | NCI-N87 | | |
| Melanoma* M14 | 6.0 | 6.9 | Gastric ca. KATO III | 0.4 | 0.4 |
| Melanoma* | 2.6 | 1.8 | Colon ca. SW-948 | 0.0 | 0.1 |
| LOXIMVI | | | | | |
| Melanoma* SK- | 5.9 | 8.2 | Colon ca. SW480 | 2.6 | 3.5 |
| MEL-5 | | | | | |
| Squamous cell | 0.2 | 0.0 | Colon ca.* (SW480 | 1.3 | 0.8 |
| carcinoma SCC-4 | | | met) SW620 | | |
| Testis Pool | 3.2 | 1.5 | Colon ca. HT29 | 0.1 | 0.0 |
| Prostate ca.* (bone | 11.0 | 11.7 | Colon ca. HCT-116 | 27.0 | 25.9 |
| met) PC-3 | | | | | |
| Prostate Pool | 0.0 | 0.1 | Colon ca. CaCo-2 | 11.7 | 13.3 |
| Placenta | 0.0 | 0.0 | Colon cancer tissue | 0.0 | 0.3 |
| Uterus Pool | 0.1 | 0.1 | Colon ca. SW1116 | 12.9 | 7.2 |
| Ovarian ca. | 2.3 | 1.2 | Colon ca. Colo-205 | 0.4 | 0.2 |
| OVCAR-3 | | | | | |
| Ovarian ca. SK-OV-3 | 1.9 | 3.2 | Colon ca. SW-48 | 0.0 | 0.3 |
| Ovarian ca. | 1.5 | 1.5 | Colon Pool | 0.0 | 0.4 |
| OVCAR-4 | | | | | |
| Ovarian ca. | 6.3 | 6.0 | Small Intestine Pool | 0.0 | 0.0 |
| OVCAR-5 | | | | | |
| Ovarian ca. IGROV-1 | 0.6 | 1.6 | Stomach Pool | 0.1 | 0.2 |
| Ovarian ca. | 6.9 | 7.9 | Bone Marrow Pool | 0.2 | 0.1 |
| OVCAR-8 | | | | | |
| Ovary | 0.0 | 0.0 | Fetal Heart | 0.0 | 0.0 |
| Breast ca. MCF-7 | 1.5 | 2.7 | Heart Pool | 0.0 | 0.0 |
| Breast ca. MDA- | 0.8 | 0.6 | Lymph Node Pool | 0.2 | 0.2 |
| MB-231 | | | | | |
| Breast ca. BT 549 | 6.8 | 11.6 | Fetal Skeletal Muscle | 0.0 | 0.0 |
| Breast ca. T47D | 21.8 | 16.8 | Skeletal Muscle Pool | 0.0 | 0.0 |
| Breast ca. MDA-N | 4.0 | 2.8 | Spleen Pool | 0.0 | 0.0 |
| Breast Pool | 0.0 | 0.0 | Thymus Pool | 0.3 | 0.1 |
| Trachea | 0.0 | 0.3 | CNS cancer (glio/astro) | 0.5 | 1.2 |
| | | | U87-MG | | |
| Lung | 0.0 | 0.0 | CNS cancer (glio/astro) | 3.2 | 3.2 |
| | | | U-118-MG | | |
| Fetal Lung | 0.0 | 0.0 | CNS cancer | 6.4 | 10.0 |
| | | | (neuro; met) SK-N-AS | | |
| Lung ca. NCI-N417 | 5.7 | 4.5 | CNS cancer (astro) SF- | 2.6 | 0.8 |
| | | | 539 | | |
| Lung ca. LX-1 | 0.2 | 0.5 | CNS cancer (astro) | 0.9 | 1.6 |
| | | | SNB-75 | | |
| Lung ca. NCI-H146 | 0.5 | 0.8 | CNS cancer (glio) | 0.3 | 0.8 |
| | | | SNB-19 | | |
| Lung ca. SHP-77 | 0.6 | 2.7 | CNS cancer (glio) SF- | 4.9 | 4.4 |
| | | | 295 | | |
| Lung ca. A549 | 6.8 | 6.6 | Brain (Amygdala) Pool | 0.0 | 0.3 |
| Lung ca. NCI-H526 | 1.6 | 2.5 | Brain (cerebellum) | 0.0 | 0.3 |
| Lung ca. NCI-H23 | 16.4 | 12.7 | Brain (fetal) | 2.0 | 2.7 |
| Lung ca. NCI-H460 | 0.3 | 0.0 | Brain (Hippocampus) | 0.3 | 0.8 |
| | | | Pool | | |
| Lung ca. HOP-62 | 0.6 | 0.8 | Cerebral Cortex Pool | 0.0 | 0.2 |
| Lung ca. NCI-H522 | 48.6 | 46.0 | Brain (Substantia nigra) | 0.4 | 0.7 |
| | | | Pool | | |
| Liver | 0.0 | 0.0 | Brain (Thalamus) Pool | 0.4 | 0.9 |
| Fetal Liver | 0.0 | 0.0 | Brain (whole) | 0.1 | 0.1 |
| Liver ca. HepG2 | 0.1 | 0.3 | Spinal Cord Pool | 0.2 | 0.3 |
| Kidney Pool | 0.1 | 0.0 | Adrenal Gland | 0.0 | 0.0 |
| Fetal Kidney | 1.0 | 1.9 | Pituitary gland Pool | 0.0 | 0.3 |
| Renal ca. 786-0 | 100.0 | 100.0 | Salivary Gland | 0.0 | 0.2 |
| Renal ca. A498 | 10.2 | 21.3 | Thyroid (female) | 1.2 | 0.3 |
| Renal ca. ACHN | 0.5 | 0.2 | Pancreatic ca. | 0.9 | 0.2 |
| | | | CAPAN2 | | |
| Renal ca. UO-31 | 1.5 | 1.8 | Pancreas Pool | 0.0 | 0.2 |

[0897] TABLE 74
Panel 4.1D

| | Rel. | | Rel. |
|---|---|---|---|
| | Exp. (%) | | Exp. (%) |
| | Ag3670, | | Ag3670, |
| | Run | | Run |
| Tissue Name | 223785547 | Tissue Name | 223785547 |
| Secondary Th1 act | 0.0 | HUVEC IL-1beta | 27.5 |
| Secondary Th2 act | 0.0 | HUVEC IFN gamma | 29.9 |
| Secondary Tr1 act | 0.0 | HUVEC TNF alpha + IFN gamma | 19.5 |
| Secondary Th1 rest | 0.0 | HUVEC TNF alpha + IL4 | 0.0 |
| Secondary Th2 rest | 0.0 | HUVEC IL-11 | 0.0 |
| Secondary Tr1 rest | 0.0 | Lung Microvascular EC none | 0.0 |
| Primary Th1 act | 0.0 | Lung Microvascular EC | 11.6 |
| | | TNFalpha + IL-1beta | |
| Primary Th2 act | 0.0 | Microvascular Dermal EC none | 0.0 |
| Primary Tr1 act | 0.0 | Microsvasular Dermal EC | 71.7 |
| | | TNFalpha + IL-1beta | |
| Primary Th1 rest | 0.0 | Bronchial epithelium TNFalpha + | 53.2 |
| | | IL1beta | |
| Primary Th2 rest | 0.0 | Small airway epithelium none | 0.0 |
| Primary Tr1 rest | 0.0 | Small airway epithelium | 0.0 |
| | | TNFalpha + IL-1beta | |
| CD45RA CD4 lymphocyte act | 0.0 | Coronery artery SMC rest | 0.0 |
| CD45RO CD4 lymphocyte act | 0.0 | Coronery artery SMC TNFalpha + | 0.0 |
| | | IL-1beta | |
| CD8 lymphocyte act | 15.1 | Astrocytes rest | 0.0 |
| Secondary CD8 lymphocyte rest | 0.0 | Astrocytes TNFalpha + IL-1beta | 0.0 |
| Secondary CD8 lymphocyte act | 39.5 | KU-812 (Basophil) rest | 0.0 |
| CD4 lymphocyte none | 0.0 | KU-812 (Basophil) | 0.0 |
| | | PMA/ionomycin | |
| 2ry Th1/Th2/Tr1_anti-CD95 | 0.0 | CCD1106 (Keratinocytes) none | 0.0 |
| CH11 | | | |
| LAK cells rest | 0.0 | ICCD 1106 (Keratinocytes)I | 38.2 |
| | | TNFalpha + IL-1beta | |
| LAK cells IL-2 | 0.0 | Liver cirrhosis | 0.0 |
| LAK cells IL-2 + IL-12 | 0.0 | NCI-H292 none | 0.0 |
| LAK cells IL-2 + IFN gamma | 0.0 | NCI-H292 IL-4 | 34.9 |
| LAK cells IL-2 + IL-18 | 0.0 | NCI-H292 IL-9 | 24.8 |
| LAK cells PMA/ionomycin | 0.0 | NCI-H292 IL-13 | 21.5 |
| NK Cells IL-2 rest | 0.0 | NCI-H292 IFN gamma | 33.9 |
| Two Way MLR 3 day | 0.0 | HPAEC none | 0.0 |
| Two Way MLR 5 day | 0.0 | HPAEC TNF alpha + IL-1 beta | 0.0 |
| Two Way MLR 7 day | 0.0 | Lung fibroblast none | 12.8 |
| PBMC rest | 0.0 | Lung fibroblast TNF alpha + IL-1 | 0.0 |
| | | beta | |
| PBMC PWM | 0.0 | Lung fibroblast IL-4 | 29.3 |
| PBMC PHA-L | 0.0 | Lung fibroblast IL-9 | 46.7 |
| Ramos (B cell) none | 0.0 | Lung fibroblast IL-13 | 0.0 |
| Ramos (B cell) ionomycin | 0.0 | Lung fibroblast IFN gamma | 0.0 |
| B lymphocytes PWM | 0.0 | Dermal fibroblast CCD1070 rest | 24.5 |
| B lymphocytes CD40L and IL-4 | 0.0 | Dermal fibroblast CCD1070 TNF | 22.8 |
| | | alpha | |
| EOL-1 dbcAMP | 100.0 | Dermal fibroblast CCD 1070 IL-1 | 0.0 |
| | | beta | 0.0 |
| EOL-1 dbcAMP | 45.1 | Dermal fibroblast IFN gamma | 0.0 |
| PMA/ionomycin | | | |
| Dendritic cells none | 0.0 | Dermal fibroblast IL-4 | 0.0 |
| Dendritic cells LPS | 0.0 | Dermal Fibroblasts rest | 0.0 |
| Dendritic cells anti-CD40 | 0.0 | Neutrophils TNFa + LPS | 0.0 |
| Monocytes rest | 0.0 | Neutrophils rest | 0.0 |
| Monocytes LPS | 0.0 | Colon | 0.0 |
| Macrophages rest | 0.0 | Lung | 0.0 |
| Macrophages LPS | 0.0 | Thymus | 0.0 |
| HUVEC none | 25.9 | Kidney | 59.5 |
| HUVEC starved | 0.0 | | |

[0898] General_Screening_Panel_v1.4 Summary: Ag3670

[0899] Two experiments with the same probe and primer sets show results that are in excellent agreement, with highest expression in a renal cancer cell line. In general, the expression of this gene appears to be largely associated with samples derived from cancer cell lines rather than normal tissues. Of note is the substantial expression associated with kidney cancer cell lines as well as in colon cancer and lung cancer cell lines. Thus, the expression of this gene could be used to distinguish these cell lines from other cell lines. Moreover, therapeutic modulation of this gene, through the use of small molecule drugs, antibodies or protein therapeutics might be of use in the treatment of kidney, colon or lung cancer.

[0900] This gene is a C1q-related factor variant, and is expressed in at least the fetal brain, hippocampus, substantia nigra and thalamus. Various members of the complement cascade have been implicated in neuroinflammation and the pathology of Alzheimer's disease. Recent case controlled studies also suggest that the use of anti-inflammatory agents decreases the risk of Alzheimer's disease. Therefore, this gene is an excellent drug target for the disruption of neuroinflammation and the treatment of Alzheimer's disease, Huntington's disease, and stroke.

[0901] References:

[0902] Lue L F, Rydel R, Brigham E F, Yang L B, Hampel H, Murphy G M Jr, Brachova L, Yan S D, Walker D G, Shen Y, Rogers J. Inflammatory repertoire of Alzheimer's disease and nondemented elderly microglia in vitro. Glia July 2001; 35(1):72-9

[0903] In this study complement activation and biosynthesis have been analysed in the brains of Huntington's disease (HD) (n=9) and normal (n=3) individuals. In HD striatum, neurons, myelin and astrocytes were strongly stained with antibodies to C1q, C4, C3, iC3b-neoepitope and C9-neoepitope. In contrast, no staining for complement components was found in the normal striatum. Marked astrogliosis and microgliosis were observed in all HD caudate and the internal capsule samples but not in normal brain. RT-PCR analysis and in-situ hybridisation were carried out to determine whether complement was synthesised locally by activated glial cells. By RT-PCR, we found that complement activators of the classical pathway C1q C chain, C1r, C4, C3, as well as the complement regulators, C1 inhibitor, clusterin, MCP, DAF, CD59, were all expressed constitutively and at much higher level in HD brains compared to normal brain. Complement anaphylatoxin receptor mRNAs (C5a receptor and C3a receptor) were strongly expressed in HD caudate. In general, we found that the level of complement mRNA in normal control brains was from 2 to 5 fold lower compared to HD striatum. Using in-situ hybridisation, we confirmed that C3 mRNA and C9 mRNA were expressed by reactive microglia in HD internal capsule. We propose that complement produced locally by reactive microglia is activated on the membranes of neurons, contributing to neuronal necrosis but also to proinflammatory activities. Complement opsonins (iC3b) and anaphylatoxins (C3a, C5a) may be involved in the recruitment and stimulation of glial cells and phagocytes bearing specific complement receptors.

[0904] Panel 4.1D Summary: Ag3670

[0905] The NOV11 transcript, which encodes a protein with homology to a C1q related factor, is expressed at a low level in eosinophils, microvascular dermal endothelial cells and bronchial epithelium. The inflammatory cytokines TNF-a and IL-1b appear to up-regulate expression of this transcript in the endothelial cells and bronchial epithelium. This suggests that expression of this transcript is regulated by inflammatory conditions such as those found in lung inflammatory disease including pneumonia and bronchitis as well as skin infection or wounds. Expression of this transcript is also up regulated in lung fibroblasts by the Th2 cytokines IL9 or IL4, conditions found in asthma and COPD. The expression of this transcript in eosinophils, cells that are frequently associated with asthma, ulcerative colitis or other Th2 mediated diseases strongly suggest that modulation of the expression of this transcript will be beneficial in the treatment of atopic lung and skin diseases. Since the C1q factor is usually involved in the activation of complement and innate immunity, modulation of the expression of this transcript could modulate excessive inflammatory processes leading to these diseases.

[0906] Panel 5D Summary: Expression is low/undetectable for all samples in this panel (CT>35). (Data not shown).

[0907] NOV12

[0908] Expression of NOV12 was assessed using the primer-probe sets Ag1586 and Ag2011, described in Tables 75 and 76. Results of the RTQ-PCR runs are shown in Tables 77, 78, 79 and 80.

TABLE 75

Probe Name Ag1586

| | | | | SEQ |
|---|---|---|---|---|
| | | | Start | ID |
| Primers | Sequences | Length | Position | NO: |
| Forward | 5′-ACCAGGATGAGTTTGTGTCA- | 22 | 735 | 190 |
| | TC-3′ | | | |
| Probe | TET-5′-CTCAAGATCCCTTCGG- | 25 | 761 | 191 |
| | ACACGCTGT-3′-TAMRA | | | |
| Reverse | 5′-TGCGGAAGCTGTACACATAG- | 22 | 809 | 192 |
| | TA-3′ | | | |

[0909] TABLE 76
Probe Name Ag2011

| | | | | |
|---|---|---|---|---|
| | | | | SEQ |
| | | | Start | ID |
| Primers | Sequences | Length | Position | NO: |

| | | | | |
|---|---|---|---|---|
| Forward | 5′-ACCAGGATGAGTTTGTGTCA- | 22 | 735 | 193 |
| | TC-3′ | | | |
| Probe | TET-5′-CTCAAGATCCCTTCGG- | 25 | 761 | 194 |
| | ACACGCTGT-3′-TAMRA | | | |
| Reverse | 5′-TGCGGAAGCTGTACACATAG- | 22 | 809 | 195 |
| | TA-3′ | | | |

[0910] TABLE 77
Panel 1.3D

| | Rel. | Rel. | | Rel. | Rel. |
|---|---|---|---|---|---|
| | Exp. (%) | Exp. (%) | | Exp. (%) | Exp. (%) |
| | Ag1586, | Ag2011, | | Ag1586, | Ag2011, |
| | Run | Run | | Run | Run |
| Tissue Name | 146473155 | 147816085 | Tissue Name | 146473155 | 147816085 |
| Liver adenocarcinoma | 29.9 | 37.6 | Kidney (fetal) | 3.8 | 3.7 |
| Pancreas | 1.7 | 0.7 | Renal ca. 786-0 | 6.1 | 11.7 |
| Pancreatic ca. CAPAN 2 | 6.3 | 9.6 | Renal ca. A498 | 25.0 | 25.9 |
| Adrenal gland | 2.6 | 2.5 | Renal ca. RXF 393 | 4.5 | 5.0 |
| Thyroid | 2.5 | 1.8 | Renal ca. ACHN | 8.8 | 11.3 |
| Salivary gland | 1.9 | 2.2 | Renal ca. UO-31 | 15.0 | 15.0 |
| Pituitary gland | 0.9 | 1.5 | Renal ca. TK-10 | 4.4 | 4.6 |
| Brain (fetal) | 12.2 | 13.1 | Liver | 0.2 | 0.1 |
| Brain (whole) | 9.7 | 10.7 | Liver (fetal) | 0.7 | 0.8 |
| Brain (amygdala) | 9.5 | 9.9 | Liver ca. | 16.8 | 12.8 |
| | | | (hepatoblast) | | |
| | | | HepG2 | | |
| Brain (cerebellum) | 3.3 | 2.3 | Lung | 5.0 | 5.1 |
| Brain (hippocampus) | 24.7 | 21.0 | Lung (fetal) | 7.4 | 8.1 |
| Brain (substantia nigra) | 0.9 | 1.3 | Lung ca. (small | 16.8 | 12.1 |
| | | | cell) LX-1 | | |
| Brain (thalamus) | 4.7 | 3.7 | Lung ca. (small | 18.4 | 23.7 |
| | | | cell) NCI-H69 | | |
| Cerebral Cortex | 75.8 | 71.2 | Lung ca. (s.cell | 8.5 | 7.2 |
| | | | var.) SHP-77 | | |
| Spinal cord | 2.0 | 2.4 | Lung ca. (large | 10.7 | 10.1 |
| | | | cell)NCI-H460 | | |
| glio/astro U87-MG | 15.3 | 17.9 | Lung ca. (non-sm. | 3.2 | 4.1 |
| | | | cell) A549 | | |
| glio/astro U-118-MG | 38.2 | 41.2 | Lung ca. (non- | 23.2 | 24.7 |
| | | | s.cell) NCI-H23 | | |
| astrocytoma SW1783 | 8.3 | 10.4 | Lung ca. (non- | 18.9 | 15.7 |
| | | | s.cell) HOP-62 | | |
| neuro*; met SK-N-AS | 23.5 | 24.3 | Lung ca. (non-s.cl) | 5.6 | 7.5 |
| | | | NCI-H522 | | |
| astrocytoma SF-539 | 19.6 | 38.4 | Lung ca. (squam.) | 13.0 | 13.1 |
| | | | SW 900 | | |
| astrocytoma SNB-75 | 44.4 | 45.1 | Lung ca. (squam.) | 6.5 | 5.7 |
| | | | NCI-H596 | | |
| glioma SNB-19 | 26.2 | 12.2 | Mammary gland | 11.5 | 9.3 |
| glioma U251 | 16.4 | 16.2 | Breast ca.* (pl.ef) | 14.1 | 14.4 |
| | | | MCF-7 | | |
| glioma SF-295 | 26.4 | 36.9 | Breast ca.* (pl.ef) | 82.9 | 87.1 |
| | | | MDA-MB-231 | | |
| Heart (Fetal) | 80.7 | 95.3 | Breast ca.* (pl.ef) | 6.1 | 4.6 |
| | | | T47D | | |
| Heart | 2.8 | 1.9 | Breast ca. BT-549 | 13.6 | 11.2 |
| Skeletal muscle (Fetal) | 85.3 | 87.7 | Breast ca. MDA-N | 28.1 | 31.6 |
| Skeletal muscle | 2.1 | 2.4 | Ovary | 20.9 | 19.5 |
| Bone marrow | 0.6 | 0.3 | Ovarian ca. | 33.0 | 40.1 |
| | | | OVCAR-3 | | |
| Thymus | 2.6 | 2.3 | Ovarian ca. | 5.5 | 5.4 |
| | | | OVCAR-4 | | |
| Spleen | 2.9 | 2.6 | Ovarian ca. | 10.9 | 13.1 |
| | | | OVCAR-5 | | |
| Lymph node | 5.1 | 5.2 | Ovarian ca. | 17.4 | 18.3 |
| | | | OVCAR-8 | | |
| Colorectal | 5.2 | 3.9 | Ovarian ca. | 4.5 | 5.3 |
| | | | IGROV-1 | | |
| Stomach | 3.7 | 5.6 | Ovarian ca. | 25.7 | 22.4 |
| | | | (ascites) SK-OV-3 | | |
| Small intestine | 1.6 | 1.3 | Uterus | 2.7 | 2.4 |
| Colon ca. SW480 | 45.4 | 55.5 | Placenta | 6.7 | 10.2 |
| Colon ca.* SW620 | 11.3 | 11.1 | Prostate | 0.4 | 1.4 |
| (SW480 met) | | | | | |
| Colon ca. HT29 | 13.3 | 13.3 | Prostate ca.* (bone | 8.4 | 11.3 |
| | | | met) PC-3 | | |
| Colon ca. HCT-116 | 10.5 | 10.5 | Testis | 8.1 | 8.5 |
| Colon ca. CaCo-2 | 24.0 | 23.0 | Melanoma | 59.0 | 86.5 |
| | | | Hs688(A).T | | |
| CC Well to Mod Diff | 19.1 | 16.6 | Melanoma* (met) | 100.0 | 100.0 |
| (ODO3866) | | | Hs688(B).T | | |
| Colon ca. HCC-2998 | 25.7 | 20.3 | Melanoma UACC- | 17.6 | 19.5 |
| | | | 62 | | |
| Gastric ca. (liver met) | 59.9 | 62.9 | Melanoma M14 | 16.3 | 21.9 |
| NCI-N87 | | | | | |
| Bladder | 1.8 | 4.6 | Melanoma LOX | 3.6 | 5.8 |
| | | | IMVI | | |
| Trachea | 6.9 | 5.6 | Melanoma* (met) | 12.9 | 22.1 |
| | | | SK-MEL-5 | | |
| Kidney | 0.8 | 0.7 | Adipose | 5.6 | 4.5 |

[0911] TABLE 78
Panel 2.2

| | Rel. | | Rel. |
|---|---|---|---|
| | Exp. (%) | | Exp. (%) |
| | Ag2011, | | Ag2011, |
| | Run | | Run |
| Tissue Name | 174154748 | Tissue Name | 174154748 |
| Normal Colon | 24.7 | Kidney Margin (OD04348) | 68.3 |
| Colon cancer (OD06064) | 48.6 | Kidney malignant cancer | 25.0 |
| | | (OD06204B) | |
| Colon Margin (OD06064) | 4.9 | Kidney normal adjacent tissue | 7.4 |
| | | (OD06204E) | |
| Colon cancer (OD06159) | 9.3 | Kidney Cancer (OD04450-01) | 34.4 |
| Colon Margin (OD06159) | 19.5 | Kidney Margin (OD04450-03) | 18.4 |
| Colon cancer (OD06297-04) | 11.7 | Kidney Cancer 8120613 | 9.7 |
| Colon Margin (OD06297-015) | 12.5 | Kidney Margin 8120614 | 18.8 |
| CC Gr. 2 ascend colon | 17.3 | Kidney Cancer 9010320 | 16.2 |
| (OD03921) | | | |
| CC Margin (OD03921) | 14.2 | Kidney Margin 9010321 | 13.8 |
| Colon cancer metastasis | 8.6 | Kidney Cancer 8120607 | 37.1 |
| (OD06104) | | | |
| Lung Margin (OD06104) | 8.3 | Kidney Margin 8120608 | 7.0 |
| Colon mets to lung (OD04451- | 23.0 | Normal Uterus | 21.9 |
| 01) | | | |
| Lung Margin (OD04451-02) | 32.8 | Uterine Cancer 064011 | 13.7 |
| Normal Prostate | 4.8 | Normal Thyroid | 2.4 |
| Prostate Cancer (OD04410) | 4.9 | Thyroid Cancer | 8.1 |
| Prostate Margin (OD04410) | 8.8 | Thyroid Cancer A302152 | 35.4 |
| Normal Ovary | 32.3 | Thyroid Margin A302153 | 8.7 |
| Ovarian cancer (OD06283-03) | 32.1 | Normal Breast | 29.7 |
| Ovarian Margin (OD06283-07) | 13.8 | Breast Cancer | 11.9 |
| Ovarian Cancer | 19.9 | Breast Cancer | 47.6 |
| Ovarian cancer (OD06145) | 9.2 | Breast Cancer (OD04590-01) | 25.5 |
| Ovarian Margin (OD06145) | 8.6 | Breast Cancer Mets (OD04590- | 38.4 |
| | | 03) | |
| Ovarian cancer (OD06455-03) | 13.0 | Breast Cancer Metastasis | 30.1 |
| Ovarian Margin (OD06455-07) | 2.1 | Breast Cancer | 41.5 |
| Normal Lung | 27.2 | Breast Cancer 9100266 | 9.2 |
| Invasive poor diff. lung adeno | 28.5 | Breast Margin 9100265 | 18.2 |
| (ODO4945-01 | | | |
| Lung Margin (ODO4945-03) | 15.0 | Breast Cancer A209073 | 14.9 |
| Lung Malignant Cancer | 30.4 | Breast Margin A2090734 | 37.6 |
| (OD03126) | | | |
| Lung Margin (OD03126) | 15.9 | Breast cancer (OD06083) | 55.9 |
| Lung Cancer (OD05014A) | 39.5 | Breast cancer node metastasis | 48.6 |
| | | (OD06083) | |
| Lung Margin (OD05014B) | 22.1 | Normal Liver | 10.4 |
| Lung cancer (OD06081) | 23.7 | Liver Cancer 1026 | 9.1 |
| Lung Margin (OD06081) | 16.8 | Liver Cancer 1025 | 20.7 |
| Lung Cancer (OD04237-01) | 9.0 | Liver Cancer 6004-T | 12.2 |
| Lung Margin (OD04237-02) | 41.5 | Liver Tissue 6004-N | 8.0 |
| Ocular Mel Met to Liver | 100.0 | Liver Cancer 6005-T | 36.6 |
| (ODO4310) | | | |
| Liver Margin (ODO4310) | 4.2 | Liver Tissue 6005-N | 25.0 |
| Melanoma Metastasis | 47.0 | Liver Cancer | 4.5 |
| Lung Margin (OD04321) | 28.1 | Normal Bladder | 18.7 |
| Normal Kidney | 12.3 | Bladder Cancer | 17.2 |
| Kidney Ca, Nuclear grade 2 | 18.3 | Bladder Cancer | 72.7 |
| (OD04338) | | | |
| Kidney Margin (OD04338) | 18.0 | Normal Stomach | 33.4 |
| Kidney Ca Nuclear grade ½ | 83.5 | Gastric Cancer 9060395 | 9.6 |
| (OD04339) | | | |
| Kidney Margin (OD04339) | 10.4 | Stomach Margin 9060396 | 10.4 |
| Kidney Ca, Clear cell type | 22.2 | Gastric Cancer 9060395 | 7.6 |
| (OD04340) | | | |
| Kidney Margin (OD04340) | 12.7 | Stomach Margin 9060394 | 19.6 |
| Kidney Ca, Nuclear grade 3 | 15.7 | Gastric Cancer 064005 | 17.4 |
| (OD04348) | | | |

[0912] TABLE 79
Panel 2D

| | Rel. | | Rel. |
|---|---|---|---|
| | Exp. (%) | | Exp. (%) |
| | Ag1586, | | Ag1586, |
| | Run | | Run |
| Tissue Name | 162624476 | Tissue Name | 162624476 |
| Normal Colon | 34.9 | Kidney Margin 8120608 | 14.2 |
| CC Well to Mod Diff | 28.3 | Kidney Cancer 8120613 | 30.4 |
| (ODO3866) | | | |
| CC Margin (ODO3866) | 9.2 | Kidney Margin 8120614 | 17.7 |
| CC Gr. 2 rectosigmoid | 25.9 | Kidney Cancer 9010320 | 57.0 |
| (ODO3868) | | | |
| CC Margin (ODO3868) | 4.7 | Kidney Margin 9010321 | 40.9 |
| CC Mod Diff (ODO3920) | 55.5 | Normal Uterus | 10.4 |
| CC Margin (ODO3920) | 14.2 | Uterine Cancer 064011 | 28.9 |
| CC Gr. 2 ascend colon | | | |
| (ODO3921) | 62.9 | Normal Thyroid | 8.4 |
| CC Margin (ODO3921) | 12.1 | Thyroid Cancer | 16.7 |
| CC from Partial Hepatectomy | 41.5 | Thyroid Cancer A302152 | 24.7 |
| (ODO4309) Mets | | | |
| Liver Margin (ODO4309) | 13.6 | Thyroid Margin A302153 | 17.7 |
| Colon mets to lung (OD04451- | 18.0 | Normal Breast | 60.3 |
| 01) | | | |
| Lung Margin (OD04451-02) | 25.5 | Breast Cancer | 24.1 |
| Normal Prostate 6546-1 | 17.0 | Breast Cancer (OD04590-01) | 47.0 |
| Prostate Cancer (OD04410) | 33.7 | Breast Cancer Mets (OD059O- | 72.7 |
| | | 03) | |
| Prostate Margin (OD04410) | 28.9 | Breast Cancer Metastasis | 37.4 |
| Prostate Cancer (OD04720-01) | 33.7 | Breast Cancer | 36.9 |
| Prostate Margin (OD04720-02) | 45.7 | Breast Cancer | 65.1 |
| Normal Lung | 80.7 | Breast Cancer 9100266 | 39.8 |
| Lung Met to Muscle (ODO4286) | 100.0 | Breast Margin 9100265 | 31.2 |
| Muscle Margin (ODO4286) | 21.5 | Breast Cancer A209073 | 49.0 |
| Lung Malignant Cancer | 57.8 | Breast Margin A2090734 | 44.8 |
| (OD03126) | | | |
| Lung Margin (OD03126) | 61.6 | Normal Liver | 4.5 |
| Lung Cancer (OD04404) | 70.2 | Liver Cancer | 2.6 |
| Lung Margin (OD04404) | 34.2 | Liver Cancer 1025 | 4.7 |
| Lung Cancer (OD04565) | 87.7 | Liver Cancer 1026 | 18.3 |
| Lung Margin (OD04565) | 23.8 | Liver Cancer 6004-T | 7.6 |
| Lung Cancer (OD04237-01) | 41.5 | Liver Tissue 6004-N | 12.0 |
| Lung Margin (OD04237-02) | 34.2 | Liver Cancer 6005-T | 12.1 |
| Ocular Mel Met to Liver | 97.3 | Liver Tissue 6005-N | 5.7 |
| (ODO4310) | | | |
| Liver Margin (ODO4310) | 5.0 | Normal Bladder | 38.2 |
| Melanoma Metastasis | 87.7 | Bladder Cancer | 21.3 |
| Lung Margin (OD04321) | 56.3 | Bladder Cancer | 46.0 |
| Normal Kidney | 30.1 | Bladder Cancer (OD04718-01) | 96.6 |
| Kidney Ca, Nuclear grade 2 | 46 7 | Bladder Normal Adjacent | 29.5 |
| (OD04338) | | (OD04718-03) | |
| Kidney Margin (OD04338) | 14.8 | Normal Ovary | 21.5 |
| Kidney Ca Nuclear grade½ | 52.1 | Ovarian Cancer | 73.7 |
| (OD04339) | | | |
| Kidney Margin (OD04338) | 20.3 | Ovarian Cancer (OD04768-07) | 48.3 |
| Kidney Ca, Clear cell type | 49.0 | Ovary Margin (OD04768-08) | 18.8 |
| (OD04340) | | | |
| Kidney Margin (OD04340) | 23.2 | Normal Stomach | 13.9 |
| Kidney Ca, Nuclear grade 3 | 42.6 | Gastric Cancer 9060358 | 6.7 |
| (OD04348) | | | |
| Kidney Margin (OD04348) | 28.9 | Stomach Margin 9060359 | 13.2 |
| Kidney Cancer (OD04622-01) | 50.7 | Gastric Cancer 9060395 | 28.3 |
| Kidney Margin (OD04622-03) | 8.6 | Stomach Margin 9060394 | 18.0 |
| Kidney Cancer (OD04450-01) | 21.8 | Gastric Cancer 9060397 | 45.4 |
| Kidney Margin (OD04450-03) | 18.2 | Stomach Margin 9060396 | 10.4 |
| Kidney Cancer 8120607 | 25.0 | Gastric Cancer 064005 | 48.3 |

[0913] TABLE 80
Panel 4D

| | Rel. Exp. (%) | | Rel. Exp. (%) |
|---|---|---|---|
| | Ag2011, Run | | Ag2011, Run |
| Tissue Name | 160997385 | Tissue Name | 160997385 |
| Secondary Th1 act | 4.7 | HUVEC IL-1beta | 2.0 |
| Secondary Th2 act | 6.4 | HUVEC IFN gamma | 4.0 |
| Secondary Tr1 act | 8.6 | HUVEC TNF alpha + IFN | 5.0 |
| | | gamma | |
| Secondary Th1 rest | 0.6 | HUVEC TNF alpha + IL4 | 8.4 |
| Secondary Th2 rest | 1.7 | HUVEC IL-11 | 3.5 |
| Secondary Tr1 rest | 1.7 | Lung Microvascular EC none | 13.0 |
| Primary Th1 act | 14.0 | Lung Microvascular EC | 15.3 |
| | | TNFalpha + IL-1beta | |
| Primary Th2 act | 7.7 | Microvascular Dermal EC | 23.2 |
| | | none | |
| Primary Tr1 act | 12.9 | Microsvasular Dermal EC | 17.3 |
| | | TNFalpha + IL-1beta | |
| Primary Th1 rest | 3.3 | Bronchial epithelium | 4.5 |
| | | TNFalpha + IL1beta | |
| Primary Th2 rest | 2.3 | Small airway epithelium | 16.0 |
| | | none | |
| Primary Tr1 rest | 2.0 | Small airway epithelium | 100.0 |
| | | TNFalpha + IL-1beta | |
| CD45RA CD4 lymphocyte | 6.5 | Coronery artery SMC rest | 15.7 |
| act | | | |
| CD45RO CD4 lymphocyte | 5.3 | Coronery artery SMC | 11.1 |
| act | | TNFalpha +IL-1beta | |
| CD8 lymphocyte act | 3.3 | Astrocytes rest | 25.3 |
| Secondary CD8 lymphocyte | 7.2 | Astrocytes TNFalpha + IL- | 21.6 |
| rest | | 1beta | |
| Secondary CD8 lymphocyte | 3.0 | KU-812 (Basophil) rest | 8.4 |
| act | | | |
| CD4 lymphocyte none | 1.6 | Ku-812 (Basophil) | 39.5 |
| | | PMA/ionomycin | |
| 2ry Th1/Th2/Tr1_anti-CD95 | 0.3 | CCD1106 (Keratinocytes) | 35.1 |
| CH11 | | none | |
| LAK cells rest | 19.1 | CCD1106 (Keratinocytes) | 5.9 |
| | | TNFalpha + IL-1beta | |
| LAK cells IL-2 | 3.1 | Liver cirrhosis | 0.9 |
| LAK cells IL-2 + IL-12 | 6.5 | Lupus kidney | 1.3 |
| LAK cells IL-2 + IFN gamma | 9.8 | NCI-H292 none | 42.3 |
| LAK cells IL-2 + IL-18 | 5.9 | NCI-H292 IL-4 | 90.1 |
| LAK cells PMA/ionomycin | 8.7 | NCI-H292 IL-9 | 58.2 |
| NK Cells IL-2 rest | 1.7 | NCI-H292 IL-13 | 33.9 |
| Two Way MLR 3 day | 9.3 | NCI-H292 IFN gamma | 30.4 |
| Two Way MLR 5 day | 7.4 | HPAEC none | 5.8 |
| Two Way MLR 7 day | 2.0 | HPAEC TNF alpha + IL-1 | 12.9 |
| | | beta | |
| PBMC rest | 1.7 | Lung fibroblast none | 23.8 |
| PBMC PWM | 12.5 | Lung fibroblast TNF alpha + | 10.7 |
| | | IL-1 beta | |
| PBMC PHA-L | 5.4 | Lung fibroblast IL-4 | 59.0 |
| Ramos (B cell) none | 0.5 | Lung fibroblast IL-9 | 40.6 |
| Ramos (B cell) ionomycin | 0.9 | Lung fibroblast IL-13 | 31.0 |
| B lymphocytes PWM | 15.6 | Lung fibroblast IFN gamma | 65.5 |
| B lymphocytes CD40L and | 5.8 | Dermal fibroblast CCD1070 | 37.4 |
| IL-4 | | rest | |
| EOL-1 dbcAMP | 3.5 | Dermal fibroblast CCD1070 | 50.0 |
| | | TNF alpha | |
| EOL-1 dbcAMP | 60.3 | Dermal fibroblast CCD1070 | 19.6 |
| PMA/ionomycin | | IL-1 beta | |
| Dendritic cells none | 17.6 | Dermal fibroblast IFN | 15.0 |
| | | gamma | |
| Dendritic cells LPS | 32.5 | Dermal fibroblast IL-4 | 43.8 |
| Dendritic cells anti-CD40 | 21.0 | IBD Colitis 2 | 0.3 |
| Monocytes rest | 0.1 | IBD Crohn's | 0.8 |
| Monocytes LPS | 8.4 | Colon | 5.3 |
| Macrophages rest | 34.2 | Lung | 15.0 |
| Macrophages LPS | 11.3 | Thymus | 5.8 |
| HUVEC none | 6.5 | Kidney | 11.4 |
| HUVEC starved | 9.3 | | |

[0914] Panel 1.3D Summary: Ag1586/Ag2011

[0915] Two experiments with the same probe and primer set produce results that are in excellent agreement. NOV12 appears to be expressed largely in cancer cell lines, with highest expression in a melanoma cell line (CTs=26-28). Of note is the expression associated with colon cancer cell lines as well as melanoma cell lines. Thus, the expression of thie gene could be used to distinguish these samples from other samples on the panel. Moreover, therapeutic modulation of this gene, through the use of small molecule drugs, antibodies or protein therapeutics might be of use in the treatment of colon cancer or melanoma.

[0916] This gene is modestly expressed in a variety of metabolic tissues including pancreas, adrenal, thyroid, pituitary, fetal liver, and adipose. Thus, this gene product may be an antibody target for the treatment of metabolic disease, including obesity and diabetes, in any or all of these tissues. In addition, NOV12 is differentially expressed in fetal (CT values=26-28) versus adult heart (CT values=31-33), and in fetal (CT values=26-28) versus adult skeletal muscle (CT values=32-33), and may be used to differentiate between the adult and fetal sources of these tissues. Furthermore, the higher levels of expression in the fetal tissues suggest that the SC132340676_A gene product may be involved in the development of heart and skeletal muscle tissue. Thus, therapeutic modulation of the expression or function of the protein encoded by the SC132340676_A gene may be beneficial in the treatment of diseases that result in weak or dystrophic heart or skeletal muscle tissue, including ardiomyopathy, atherosclerosis, hypertension, congenital heart defects, aortic stenosis, atrial septal defect (ASD), atrioventricular (A-V) canal defect, ductus arteriosus, pulmonary stenosis, subaortic stenosis, ventricular septal defect (VSD), valve diseases, muscular dystrophy, Lesch-Nyhan syndrome, and myasthenia gravis.

[0917] This gene represents a novel protein with homology to a plexin that is expressed at moderate to high levels in all brain regions examined. Plexins act as receptors for semaphorins in the CNS. The interactions of the semaphorins and their receptors are critical for axon guidance. Therefore, this gene product may be useful as a drug target in clinical conditions where axonal growth and/or compensatory synaptogenesis are desireable (spinal cord or head trauma, stroke, or neurodegenerative diseases such as Alzheimer's, Parkinson's, or Huntington's disease).

[0918] References:

[0919] 1. Pasterkamp R J, Ruitenberg M J, Verhaagen J. Semaphorins and their receptors in olfactory axon guidance. Cell Mol Biol (Noisy-le-grand) September 1999; 45(6):763-79

[0920] The mammalian olfactory system is capable of discriminating among a large variety of odor molecules and is therefore essential for the identification of food, enemies and mating partners. The assembly and maintenance of olfactory connectivity have been shown to depend on the combinatorial actions of a variety of molecular signals, including extracellular matrix, cell adhesion and odorant receptor molecules. Recent studies have identified semaphorins and their receptors as putative molecular cues involved in olfactory pathfinding, plasticity and regeneration. The semaphorins comprise a large family of secreted and transmembrane axon guidance proteins, being either repulsive or attractive in nature. Neuropilins were shown to serve as receptors for secreted class 3 semaphorins, whereas members of the plexin family are receptors for class 1 and V (viral) semaphorins. The present review will discuss a role for semaphorins and their receptors in the establishment and maintenance of olfactory connectivity.

[0921] 2. Murakami Y, Suto F, Shimizu M, Shinoda T, Kameyama T, Fujisawa H. Differential expression of plexin-A subfamily members in the mouse nervous system. Dev Dyn March 2001; 220(3):246-58

[0922] Plexins comprise a family of transmembrane proteins (the plexin family) which are expressed in nervous tissues. Some plexins have been shown to interact directly with secreted or transmembrane semaphorins, while plexins belonging to the A subfamily are suggested to make complexes with other membrane proteins, neuropilins, and propagate chemorepulsive signals of secreted semaphorins of class 3 into cells or neurons. Despite that much information has been gathered on the plexin-semaphorin interaction, the role of plexins in the nervous system is not well understood. To gain insight into the functions of plexins in the nervous system, we analyzed spatial and temporal expression patterns of three members of the plexin-A subfamily (plexin-A1, -A2, and -A3) in the developing mouse nervous system by in situ hybridization analysis in combination with immunohistochemistry. We show that the three plexins are differentially expressed in sensory receptors or neurons in a developmentally regulated manner, suggesting that a particular plexin or set of plexins is shared by neuronal elements and functions as the receptor for semaphorins to regulate neuronal development.

[0923] Panel 2.2 Summary: Ag2011

[0924] The expression of NOV12 appears to be highest in a sample derived from a melanoma metastasis. In addition, there is substantial expression in another melanoma sample. These results are in agreement with the results seen in Panel 1.3D, with significant expression detected in melanoma cell lines. Thus, the expression of this gene could be used to distinguish melanoma from other cancer types in this panel. Moreover, therapeutic modulation of this gene, through the use of small molecule drugs, antibodies or protein therapeutics might be of use in the treatment of melanoma.

[0925] Panel 2D Summary: Ag1586

[0926] The expression of NOV12 is highest in a sample derived from a metastasis of lung cancer. Thus, the expression of this gene could be used to distinguish this sample from the others in the panel. In addition, there is substantial expression in bladder cancer, when compared to its normal adjacent tissue, as well as in two samples of melanoma. Thus, the expression of this gene could be used to distinguish this bladder cancer from its normal adjacent tissue, or these melanomas from other samples. Moreover, therapeutic modulation of this gene, through the use of small molecule drugs, antibodies or protein therapeutics might be of use in the treatment of lung cancer, bladder cancer or melanoma.

[0927] Panel 4D Summary: Ag2011

[0928] Significant expression of the NOV12 transcript is found in small airway epithelium upon treatment with the pro-inflammatory cytokines TNF-a and IL-1b (CT=26.5), the muco-epidermoid cell line H 292 treated with IL-4 or IL-9, and in lung fibroblasts treated with IFN-g or IL-4. The constitutive expression of this transcript in these tissues is highly up-regulated by pro-inflammatory cytokines or in conditions reflecting a Th2 mediated mechanism. Therefore, modulation of the expression of the protein encoded by this transcript could be useful for the treatment of lung inflammatory diseases that result from infection of the lung (bronchitis, pneumonia) and for the treatment of Th2-mediated lung disease such as asthma or COPD. Significant expression of this transcript is also found in eosinophils upon PMA and ionomycin treatment, conditions that lead to production of eosinophil specific mediators. This production could contribute to the pathologies associated with asthma, other atopic diseases and inflammatory bowel disease. This gene encodes a novel protein with homology to members of the plexin family, a family of transmembrane proteins which act as receptors for semaphorins. In neurons, semaphorins provide essential attractive and repulsive cues that are necessary for axon guidance. The description of the interaction of plexin wih tyrosine kinase in the fetal lung suggests that this protein may play a role not only in morphogenesis but also in proliferation of activation. (See reference below.) Therefore, modulation of the experession of this protein by either antibody or small molecules could be beneficial for the treatment of inflammatory lung, bowel and skin diseases.

[0929] Reference:

[0930] 1. Cell Oct. 1, 1999; 99(1):71-80

[0931] Plexins are a large family of receptors for transmembrane, secreted, and GPI-anchored semaphorins in vertebrates.

[0932] Tamagnone L, Artigiani S, Chen H, He Z, Ming G I, Song H, Chedotal A, Winberg M L, Goodman C S, Poo M, Tessier-Lavigne M, Comoglio P M.

[0933] Institute for Cancer Research and Treatment, University of Torino, Candiolo, Italy. Itamagnone@ircc.unito.it

[0934] In Drosophila, plexin A is a functional receptor for semaphorin-1a. Here we show that the human plexin gene family comprises at least nine members in four subfamilies. Plexin-B 1 is a receptor for the transmembrane semaphorin Sema4D (CD 100), and plexin-C1 is a receptor for the GPI-anchored semaphorin Sema7A (Sema-K1). Secreted (class 3) semaphorins do not bind directly to plexins, but rather plexins associate with neuropilins, coreceptors for these semaphorins. Plexins are widely expressed: in neurons, the expression of a truncated plexin-A1 protein blocks axon repulsion by Sema3A. The cytoplasmic domain of plexins associates with a tyrosine kinase activity. Plexins may also act as ligands mediating repulsion in epithelial cells in vitro. We conclude that plexins are receptors for multiple (and perhaps all) classes of semaphorins, either alone or in combination with neuropilins, and trigger a novel signal transduction pathway controlling cell repulsion

[0935] PMID: 10520995

### Example 3

[0936] SNP Analysis of NOVX Clones

[0937] SeqCallingTM Technology: cDNA was derived from various human samples representing multiple tissue types, normal and diseased states, physiological states, and developmental states from different donors. Samples were obtained as whole tissue, cell lines, primary cells or tissue cultured primary cells and cell lines. Cells and cell lines may have been treated with biological or chemical agents that regulate gene expression for example, growth factors, chemokines, steroids. The cDNA thus derived was then sequenced using CuraGen's proprietary SeqCalling technology. Sequence traces were evaluated manually and edited for corrections if appropriate. cDNA sequences from all samples were assembled with themselves and with public ESTs using bioinformatics programs to generate CuraGen's human SeqCalling database of SeqCalling assemblies. Each assembly contains one or more overlapping cDNA sequences derived from one or more human samples. Fragments and ESTs were included as components for an assembly when the extent of identity with another component of the assembly was at least 95% over 50 bp. Each assembly can represent a gene and/or its variants such as splice forms and/or single nucleotide polymorphisms (SNPs) and their combinations.

[0938] Variant sequences are included in this application. A variant sequence can include a single nucleotide polymorphism (SNP). A SNP can, in some instances, be referred to as a “cSNP” to denote that the nucleotide sequence containing the SNP originates as a cDNA. A SNP can arise in several ways. For example, a SNP may be due to a substitution of one nucleotide for another at the polymorphic site. Such a substitution can be either a transition or a transversion. A SNP can also arise from a deletion of a nucleotide or an insertion of a nucleotide, relative to a reference allele. In this case, the polymorphic site is a site at which one allele bears a gap with respect to a particular nucleotide in another allele. SNPs occurring within genes may result in an alteration of the amino acid encoded by the gene at the position of the SNP. Intragenic SNPs may also be silent, however, in the case that a codon including a SNP encodes the same amino acid as a result of the redundancy of the genetic code. SNPs occurring outside the region of a gene, or in an intron within a gene, do not result in changes in any amino acid sequence of a protein but may result in altered regulation of the expression pattern for example, alteration in temporal expression, physiological response regulation, cell type expression regulation, intensity of expression, stability of transcribed message.

[0939] Method of novel SNP Identification: SNPs are identified by analyzing sequence assemblies using CuraGen's proprietary SNPTool algorithm. SNPTool identifies variation in assemblies with the following criteria: SNPs are not analyzed within 10 base pairs on both ends of an alignment; Window size (number of bases in a view) is 10; The allowed number of mismatches in a window is 2; Minimum SNP base quality (PHRED score) is 23; Minimum number of changes to score an SNP is 2/assembly position. SNPTool analyzes the assembly and displays SNP positions, associated individual variant sequences in the assembly, the depth of the assembly at that given position, the putative assembly allele frequency, and the SNP sequence variation. Sequence traces are then selected and brought into view for manual validation. The consensus assembly sequence is imported into CuraTools along with variant sequence changes to identify potential amino acid changes resulting from the SNP sequence variation. Comprehensive SNP data analysis is then exported into the SNPCalling database.

[0940] Method of novel SNP Confirmation: SNPs are confirmed employing a validated method know as Pyrosequencing (Pyrosequencing, Westborough, Mass.). Detailed protocols for Pyrosequencing can be found in: Alderborn et al. Determination of Single Nucleotide Polymorphisms by Real-time Pyrophosphate DNA Sequencing. (2000). Genome Research. 10, Issue 8, August. 1249-1265. In brief, Pyrosequencing is a real time primer extension process of genotyping. This protocol takes double-stranded, biotinylated PCR products from genomic DNA samples and binds them to streptavidin beads. These beads are then denatured producing single stranded bound DNA. SNPs are characterized utilizing a technique based on an indirect bioluminometric assay of pyrophosphate (PPi) that is released from each dNTP upon DNA chain elongation. Following Klenow polymerase-mediated base incorporation, PPi is released and used as a substrate, together with adenosine 5′-phosphosulfate (APS), for ATP sulfurylase, which results in the formation of ATP. Subsequently, the ATP accomplishes the conversion of luciferin to its oxi-derivative by the action of luciferase. The ensuing light output becomes proportional to the number of added bases, up to about four bases. To allow processivity of the method dNTP excess is degraded by apyrase, which is also present in the starting reaction mixture, so that only dNTPs are added to the template during the sequencing. The process has been fully automated and adapted to a 96-well format, which allows rapid screening of large SNP panels. The DNA and protein sequences for the novel single nucleotide polymorphic variants are reported. Variants are reported individually but any combination of all or a select subset of variants are also included. In addition, the positions of the variant bases and the variant amino acid residues are underlined.

[0941] Results

[0942] Variants are reported individually but any combination of all or a select subset of variants are also included as contemplated NOVX embodiments of the invention.

[0943] NOV6 SNP data:

[0944] NOV6 has two SNP variants, whose variant positions for their nucleotide and amino acid sequences is numbered according to SEQ ID NOS: 17 and 18, respectively. The nucleotide sequence of the NOV6 variants differs as shown in Table 81.

TABLE 81
cSNP and Coding Variants for NOV6

| NT position | Wild Type | | Amino Acid | Amino Acid |
|---|---|---|---|---|
| of cSNP | NT | Variant NT | position | Change |
| 446 | T | C | No change | No change |
| 553 | A | G | No change | No change |

[0945] NOV8 has two SNP variants, whose variant positions for their nucleotide and amino acid sequences is numbered according to SEQ ID NOS: 21 and 22, respectively. The nucleotide sequence of the NOV8 variants differs as shown in Table 82.

TABLE 82
cSNP and Coding Variants for NOV8

| NT Position | Wild Type | | Amino Acid | Amino Acid |
|---|---|---|---|---|
| of cSNP | NT | Variant NT | position | Change |
| 564 | G | A | 109 | G->D |
| 976 | T | G | No change | No change |

[0946] NOV9 SNP Data:

[0947] NOV 9 has two SNP variants, whose variant positions for their nucleotide and amino acid sequences is numbered according to SEQ ID NO: 23 and 24, respectively. The nucleotide sequence of the NOV9 variants differs as shown in Table 83.

TABLE 83
cSNP and Coding Variants for NOV9

| NT Position | Wild Type | | Amino Acid | Amino Acid |
|---|---|---|---|---|
| of cSNP | NT | Variant NT | position | Change |
| 111 | A | C | No change | No change |
| 200 | A | G | 62 | K→R |

[0948] NOV10 SNP Data:

[0949] NOV10 has two SNP variants, whose variant positions for their nucleotide and amino acid sequences is numbered according to SEQ ID NOS: 25 and 26, respectively. The nucleotide sequence of the NOV10 variants differs as shown in Table 84.

TABLE 84
cSNP and Coding Variants for NOV10

| NT Position | Wild Type | | Amino Acid | Amino Acid |
|---|---|---|---|---|
| of cSNP | NT | Variant NT | position | Change |
| 2129 | C | T | No change | No change |
| 2450 | T | C | No change | No change |

[0950] NOV11 SNP Data:

[0951] NOV11a has three SNP variants, whose variant positions for their nucleotide and amino acid sequences is numbered according to SEQ ID NOS: 27 and 28, respectively. The nucleotide sequence of the NOV11a variant differs as shown in Table 85.

TABLE 85
cSNP and Coding Variants for NOV11a

| NT Position | Wild Type | Variant | Amino Acid | Amino Acid |
|---|---|---|---|---|
| of cSNP | NT | NT | position | Change |
| 122 | C | G | No change | No change |
| 208 | G | C | No change | No change |
| 372 | C | T | 97 | P −> L |
| 482 | A | G | 134 | N −> D |

### Example 4

[0952] In-frame Cloning

[0953] NOV1b

[0954] For NOV1b, the cDNA coding for the DOMAIN of NOV1a (CG50718-02) from residues 18 to 917 was targeted for “in-frame” cloning by PCR. The PCR template was based on the previously identified plasmid, when available, or on human cDNA(s).

TABLE 86

Oligonucleotide primers used to clone the target cDNA sequence:

| | |
|---|---|
| Primers | Sequences |

| | | |
|---|---|---|
| F1 | 5′-AGATCTCAGGTAGATGTTTCCAATGTCGTTCC-3′ | (SEQ ID NO:196) |
| R1 | 5′-CTCGAGGCTAGCGTTACATAAGCACTGTATTCAAC-3′ | (SEQ ID NO:197) |

[0955] NOV11c

[0956] For NOV11c, the cDNA coding for the DOMAIN of NOV11b (CG54503_{—}02) from residues 15 to 238 was targeted for “in-frame” cloning by PCR. The PCR template was based on the previously identified plasmid, when available, or on human cDNA(s).

TABLE 87

Oligonucleotide primers used to clone the target cDNA sequence:

| | |
|---|---|
| Primers | Sequences |

| | | |
|---|---|---|
| F2 | 5′-GGATCC TCCCGCGGGCCAGCGCACTACGAGATGCTGGGTCG-3′ | (SEQ ID NO:198) |
| R1 | 5′-CTCGAGGTCGGGGTAGAT GATGAAGCCGGAGAAGGTGCTGTACTTGTTGG-3′ | (SEQ ID NO:199) |

[0957] For downstream cloning purposes, the forward primer includes an in-frame Hind III restriction site and the reverse primer contains an in-frame Xho I restriction site.

[0958] Two parallel PCR reactions were set up using a total of 0.5-1.0 ng human pooled cDNAs as template for each reaction. The pool is composed of 5 micrograms of each of the following human tissue cDNAs: adrenal gland, whole brain, amygdala, cerebellum, thalamus, bone marrow, fetal brain, fetal kidney, fetal liver, fetal lung, heart, kidney, liver, lymphoma, Burkitt's Raji cell line, mammary gland, pancreas, pituitary gland, placenta, prostate, salivary gland, skeletal muscle, small Intestine, spleen, stomach, thyroid, trachea, uterus.

[0959] When the tissue of expression is known and available, the second PCR was performed using the above primers and 0.5ng-1.0 ng of one of the following human tissue cDNAs:

[0960] skeleton muscle, testis, mammary gland, adrenal gland, ovary, colon, normal cerebellum, normal adipose, normal skin, bone marrow, brain amygdala, brain hippocampus, brain substantia nigra, brain thalamus, thyroid, fetal lung, fetal liver, fetal brain, kidney, heart, spleen, uterus, pituitary gland, lymph node, salivary gland, small intestine, prostate, placenta, spinal cord, peripheral blood, trachea, stomach, pancreas, hypothalamus.

[0961] The reaction mixtures contained 2 microliters of each of the primers (original concentration: 5 pmol/ul), 1 microliter of 10 mM dNTP (Clontech Laboratories, Palo Alto Calif.) and 1 microliter of 50×Advantage-HF 2 polymerase (Clontech Laboratories) in 50 microliter-reaction volume. The following reaction conditions were used:

PCR condition 1:

| a) | 96° C. | 3 minutes |
|---|---|---|
| b) | 96° C. | 30 seconds denaturation |
| c) | 60° C. | 30 seconds, primer annealing |
| d) | 72° C. | 6 minutes extension |
| Repeat steps b-d 15 times | | |
| e) | 96° C. | 15 seconds denaturation |
| f) | 60° C. | 30 seconds, primer annealing |
| g) | 72° C. | 6 minutes extension |
| Repeat steps e-g 29 times | | |
| e) | 72° C. | 10 minutes final extension |

PCR condition 2:

| a) | 96° C. | 3 minutes |
|---|---|---|
| b) | 96° C. | 15 seconds denaturation |
| c) | 76° C. | 30 seconds, primer annealing, |
| | | reducing the temperature by |
| | | 1° C. per cycle |
| d) | 72° C. | 4 minutes extension |
| Repeat steps b-d 34 times | | |
| e) | 72° C. | 10 minutes final extension |

[0962] An amplified product was detected by agarose gel electrophoresis. The fragment was gel-purified and ligated into the pCR2.1 vector (Invitrogen, Carlsbad, Calif.) following the manufacturer's recommendation. Twelve clones per PCR reaction were picked and sequenced. The inserts were sequenced using vector-specific M13 Forward and M13 Reverse primers and the gene-specific primers in Tables 88 and 89.

TABLE 88

Gene-specific Primers

| | | |
|---|---|---|
| NOV | Primers | Sequences |

| | | | |
|---|---|---|---|
| NOV11c | SF1 | GCCCTCCCGGTCCAGGTC | (SEQ ID NO:200) |
| | SF2 | GGCGACGGCACCAGCATGT | (SEQ ID NO:201) |
| | SR1 | GCCTGGCCTGCCCGGTTCT | (SEQ ID NO:202) |
| | SR2 | CATGAGCACGTGGTAAGCG | (SEQ ID NO:203) |

[0963] TABLE 89
Gene-specific Primers

| | | |
|---|---|---|
| NOV | Primers | Sequences |

(SEQ ID NO:204)

| | | |
|---|---|---|
| NOV1b | SF1 | GTGCTGGCATTGGAGTGTTTAGTG |

(SEQ ID NO:205)

| | |
|---|---|
| SF2 | ATCAAGCACGTTGACACAGAATGAG |

(SEQ ID NO:206)

| | |
|---|---|
| SF3 | GCATTCACTAACCTAACACCATTTACA |

(SEQ ID NO:207)

| | |
|---|---|
| SF4 | GTTCAGCAGAGATGTCGTCTGACCTTC |

(SEQ ID NO:208)

| | |
|---|---|
| SF5 | GGGATCCTCCAGATCCTGTATTTTT |

(SEQ ID NO:209)

| | |
|---|---|
| SF6 | TGAAGAACACATCAACAACAGACATAA |

(SEQ ID NO:210)

| | |
|---|---|
| SR1 | ACTGTTTTCAGCAGCTACCTTAATTTC |

(SEQ ID NO:211)

| | |
|---|---|
| SR2 | CTTGATGAATGTGTGGTACGCGAT |

(SEQ ID NO:212)

| | |
|---|---|
| SR3 | GTGAATGCAAACTTGAGGTCTTTTGT |

(SEQ ID NO:213)

| | |
|---|---|
| SR4 | CCTCATATAATCCTACCATTGGCTGTACT |

(SEQ ID NO:214)

| | |
|---|---|
| SR5 | GAGGATCCCAGTGTAAAAATACTTCTG |

(SEQ ID NO:215)

| | |
|---|---|
| SR6 | TAGCACTTCATAAGCAATAATGATCCC |

(SEQ ID NO:216)

| | |
|---|---|
| SR7 | TGAGTGTACTAGCAGACACCTCAATGAT |

### OTHER EMBODIMENTS

[0964] Although particular embodiments have been disclosed herein in detail, this has been done by way of example for purposes of illustration only, and is not intended to be limiting with respect to the scope of the appended claims, which follow. In particular, it is contemplated by the inventors that various substitutions, alterations, and modifications may be made to the invention without departing from the spirit and scope of the invention as defined by the claims. The choice of nucleic acid starting material, clone of interest, or library type is believed to be a matter of routine for a person of ordinary skill in the art with knowledge of the embodiments described herein. Other aspects, advantages, and modifications considered to be within the scope of the following claims.

What is claimed is:

1. An isolated polypeptide comprising an amino acid sequence selected from the group consisting of:
(a) a mature form of an amino acid sequence selected from the group consisting of SEQ ID NOS: 2, 4, 6, 8, 10, 12, 14, 16, 18, 20, 22, 24, 26, 28, 30, and 32;
(b) a variant of a mature form of an amino acid sequence selected from the group consisting of SEQ ID NOS: 2, 4, 6, 8, 10, 12, 14, 16, 18, 20, 22, 24, 26, 28, 30, and 32, wherein one or more amino acid residues in said variant differs from the amino acid sequence of said mature form, provided that said variant differs in no more than 15% of the amino acid residues from the amino acid sequence of said mature form;
(c) an amino acid sequence selected from the group consisting SEQ ID NOS: 2, 4, 6, 8, 10, 12, 14, 16, 18, 20, 22, 24, 26, 28, 30, and 32; and
(d) a variant of an amino acid sequence selected from the group consisting of SEQ ID NOS: 2, 4, 6, 8, 10, 12, 14, 16, 18, 20, 22, 24, 26, 28, 30, and 32, wherein one or more amino acid residues in said variant differs from the amino acid sequence of said mature form, provided that said variant differs in no more than 15% of amino acid residues from said amino acid sequence.

2 The polypeptide of claim 1, wherein said polypeptide comprises the amino acid sequence of a naturally-occurring allelic variant of an amino acid sequence selected from the group consisting SEQ ID NOS: 2, 4, 6, 8, 10, 12, 14, 16, 18, 20, 22, 24, 26, 28, 30, and 32.

3. The polypeptide of claim 2, wherein said allelic variant comprises an amino acid sequence that is the translation of a nucleic acid sequence differing by a single nucleotide from a nucleic acid sequence selected from the group consisting of SEQ ID NOS: 1, 3, 5, 7, 9, 11, 13, 15, 17, 19, 21, 23, 25, 27, 29, and 31.

4. The polypeptide of claim 1, wherein the amino acid sequence of said variant comprises a conservative amino acid substitution.

5. An isolated nucleic acid molecule comprising a nucleic acid sequence encoding a polypeptide comprising an amino acid sequence selected from the, group consisting of:
(a) a mature form of an amino acid sequence selected from the group consisting of SEQ ID NOS: 2, 4, 6, 8, 10, 12, 14, 16, 18, 20, 22, 24, 26, 28, 30, and 32;
(b) a variant of a mature form of an amino acid sequence selected from the group consisting of SEQ ID NOS: 2, 4, 6, 8, 10, 12, 14, 16, 18, 20, 22, 24, 26, 28, 30, and 32, wherein one or more amino acid residues in said variant differs from the amino acid sequence of said mature form, provided that said variant differs in no more than 15% of the amino acid residues from the amino acid sequence of said mature form;
(c) an amino acid sequence selected from the group consisting of SEQ ID NOS: 2, 4, 6, 8, 10, 12, 14, 16, 18, 20, 22, 24, 26, 28, 30, and 32;
(d) a variant of an amino acid sequence selected from the group consisting SEQ ID NOS: 2, 4, 6, 8, 10, 12, 14, 16, 18, 20, 22, 24, 26, 28, 30, and 32, wherein one or more amino acid residues in said variant differs from the amino acid sequence of said mature form, provided that said variant differs in no more than 15% of amino acid residues from said amino acid sequence;
(e) a nucleic acid fragment encoding at least a portion of a polypeptide comprising an amino acid sequence chosen from the group consisting of SEQ ID NOS: 2, 4, 6, 8, 10, 12, 14, 16, 18, 20, 22, 24, 26, 28, 30, and 32, or a variant of said polypeptide, wherein one or more amino acid residues in said variant differs from the amino acid sequence of said mature form, provided that said variant differs in no more than 15% of amino acid residues from said amino acid sequence; and
(f) a nucleic acid molecule comprising the complement of (a), (b), (c), (d) or (e).

6. The nucleic acid molecule of claim 5, wherein the nucleic acid molecule comprises the nucleotide sequence of a naturally-occurring allelic nucleic acid variant.

7. The nucleic acid molecule of claim 5, wherein the nucleic acid molecule encodes a polypeptide comprising the amino acid sequence of a naturally-occurring polypeptide variant.

8. The nucleic acid molecule of claim 5, wherein the nucleic acid molecule differs by a single nucleotide from a nucleic acid sequence selected from the group consisting of SEQ ID NOS: 1, 3, 5, 7, 9, 11, 13, 15, 17, 19, 21, 23, 25, 27, 29, and31.

9. The nucleic acid molecule of claim 5, wherein said nucleic acid molecule comprises a nucleotide sequence selected from the group consisting of:
(a) a nucleotide sequence selected from the group consisting of SEQ ID NOS: 1, 3, 5, 7, 9, 11, 13, 15, 17, 19, 21, 23, 25, 27, 29, and31;
(b) a nucleotide sequence differing by one or more nucleotides from a nucleotide sequence selected from the group consisting of SEQ ID NOS: 1, 3, 5, 7, 9, 11, 13, 15, 17, 19, 21, 23, 25, 27, 29, and 31, provided that no more than 20% of the nucleotides differ from said nucleotide sequence;
(c) a nucleic acid fragment of (a); and
(d) a nucleic acid fragment of (b).

10. The nucleic acid molecule of claim 5, wherein said nucleic acid molecule hybridizes under stringent conditions to a nucleotide sequence chosen from the group consisting SEQ ID NOS: 1, 3, 5, 7, 9, 11, 13, 15, 17, 19, 21, 23, 25, 27, 29, and 31, or a complement of said nucleotide sequence.

11. The nucleic acid molecule of claim 5, wherein the nucleic acid molecule comprises a nucleotide sequence selected from the group consisting of:
(a) a first nucleotide sequence comprising a coding sequence differing by one or more nucleotide sequences from a coding sequence encoding said amino acid sequence, provided that no more than 20% of the nucleotides in the coding sequence in said first nucleotide sequence differ from said coding sequence;
(b) an isolated second polynucleotide that is a complement of the first polynucleotide;
and
(c) a nucleic acid fragment of (a) or (b).

12. A vector comprising the nucleic acid molecule of claim 11.

13. The vector of claim 12, further comprising a promoter operably-linked to said nucleic acid molecule.

14. A cell comprising the vector of claim 12.

15. An antibody that binds immunospecifically to the polypeptide of claim 1.

16. The antibody of claim 15, wherein said antibody is a monoclonal antibody.

17. The antibody of claim 15, wherein the antibody is a humanized antibody.

18. A method for determining the presence or amount of the polypeptide of claim 1 in a sample, the method comprising:
(a) providing the sample;
(b) contacting the sample with an antibody that binds immunospecifically to the polypeptide; and
(c) determining the presence or amount of antibody bound to said polypeptide, thereby determining the presence or amount of polypeptide in said sample.

19. A method for determining the presence or amount of the nucleic acid molecule of claim 5 in a sample, the method comprising:
(a) providing the sample;
(b) contacting the sample with a probe that binds to said nucleic acid molecule; and
(c) determining the presence or amount of the probe bound to said nucleic acid molecule,
thereby determining the presence or amount of the nucleic acid molecule in said sample.

20. The method of claim 19 wherein presence or amount of the nucleic acid molecule is used as a marker for cell or tissue type.

21. The method of claim 20 wherein the cell or tissue type is cancerous.

22. A method of identifying an agent that binds to a polypeptide of claim 1, the method comprising:
(a) contacting said polypeptide with said agent; and
(b) determining whether said agent binds to said polypeptide.

23. The method of claim 22 wherein the agent is a cellular receptor or a downstream effector.

24. A method for identifying an agent that modulates the expression or activity of the polypeptide of claim 1, the method comprising:
(a) providing a cell expressing said polypeptide;
(b) contacting the cell with said agent, and
(c) determining whether the agent modulates expression or activity of said polypeptide,
whereby an alteration in expression or activity of said peptide indicates said agent modulates expression or activity of said polypeptide.

25. A method for modulating the activity of the polypeptide of claim 1, the method comprising contacting a cell sample expressing the polypeptide of said claim with a compound that binds to said polypeptide in an amount sufficient to modulate the activity of the polypeptide.

26. A method of treating or preventing a NOVX-associated disorder, said method comprising administering to a subject in which such treatment or prevention is desired the polypeptide of claim 1 in an amount sufficient to treat or prevent said NOVX-associated disorder in said subject.

27. The method of claim 26 wherein the disorder is selected from the group consisting of cardiomyopathy and atherosclerosis.

28. The method of claim 26 wherein the disorder is related to cell signal processing and metabolic pathway modulation.

29. The method of claim 26, wherein said subject is a human.

30. A method of treating or preventing a NOVX-associated disorder, said method comprising administering to a subject in which such treatment or prevention is desired the nucleic acid of claim 5 in an amount sufficient to treat or prevent said NOVX-associated disorder in said subject.

31. The method of claim 30 wherein the disorder is selected from the group consisting of cardiomyopathy and atherosclerosis.

32. The method of claim 30 wherein the disorder is related to cell signal processing and metabolic pathway modulation.

33. The method of claim 30, wherein said subject is a human.

34. A method of treating or preventing a NOVX-associated disorder, said method comprising administering to a subject in which such treatment or prevention is desired the antibody of claim 15 in an amount sufficient to treat or prevent said NOVX-associated disorder in said subject.

35. The method of claim 34 wherein the disorder is diabetes.

36. The method of claim 34 wherein the disorder is related to cell signal processing and metabolic pathway modulation.

37. The method of claim 34, wherein the subject is a human.

38. A pharmaceutical composition comprising the polypeptide of claim 1 and a pharmaceutically-acceptable carrier.

39. A pharmaceutical composition comprising the nucleic acid molecule of claim 5 and a pharmaceutically-acceptable carrier.

40. A pharmaceutical composition comprising the antibody of claim 15 and a pharmaceutically-acceptable carrier.

41. A kit comprising in one or more containers, the pharmaceutical composition of claim 38.

42. A kit comprising in one or more containers, the pharmaceutical composition of claim 39.

43. A kit comprising in one or more containers, the pharmaceutical composition of claim 40.

44. A method for determining the presence of or predisposition to a disease associated with altered levels of the polypeptide of claim 1 in a first mammalian subject, the method comprising:
(a) measuring the level of expression of the polypeptide in a sample from the first mammalian subject; and
(b) comparing the amount of said polypeptide in the sample of step (a) to the amount of the polypeptide present in a control sample from a second mammalian subject known not to have, or not to be predisposed to, said disease;
wherein an alteration in the expression level of the polypeptide in the first subject as compared to the control sample indicates the presence of or predisposition to said disease.

45. The method of claim 44 wherein the predisposition is to a cancer.

46. A method for determining the presence of or predisposition to a disease associated with altered levels of the nucleic acid molecule of claim 5 in a first mammalian subject, the method comprising:
(a) measuring the amount of the nucleic acid in a sample from the first mammalian subject; and
(b) comparing the amount of said nucleic acid in the sample of step (a) to the amount of the nucleic acid present in a control sample from a second mammalian subject known not to have or not be predisposed to, the disease;
wherein an alteration in the level of the nucleic acid in the first subject as compared to the control sample indicates the presence of or predisposition to the disease.

47. The method of claim 46 wherein the predisposition is to a cancer.

48. A method of treating a pathological state in a mammal, the method comprising administering to the mammal a polypeptide in an amount that is sufficient to alleviate the pathological state, wherein the polypeptide is a polypeptide having an amino acid sequence at least 95% identical to a polypeptide comprising an amino acid sequence of at least one of SEQ ID NOS: 2, 4, 6, 8, 10, 12, 14, 16, 18, 20, 22, 24, 26, 28, 30, and 32, or a biologically active fragment thereof.

49. A method of treating a pathological state in a mammal, the method comprising administering to the mammal the antibody of claim 15 in an amount sufficient to alleviate the pathological state.

The application's sequence listing, which the Patent Office published only in electronic form, follows.

SEQUENCE LISTING (216 sequences)

SEQ ID NO: 1 - DNA, 2860 bp, Homo sapiens
agactggggccagggagacagccctgggggagaggcgcccgaaccaggccgcgggagcatgggggcccggagcggagctcggggcgcgctgctgctggcactgctgctctgctgggacccgaggctgagccaagcaggcactgattctggcagcgaggtgctccctgactccttcccgtcagcgccagcagagccgctgccctacttcctgcaggagccacaggacgcctacattgtgaagaacaagcctgtggagctccgctgccgcgccttccccgccacacagatctacttcaagtgcaacggcgagtgggtcagccagaacgaccacgtcacacaggaaggcctggatgaggccaccggtctgcgggtgcgcgaggtgcagatcgaggtgtcgcggcagcaggtggaggagctctttgggctggaggattactggtgccagtgcgtggcctggagctccgcgggcaccaccaagagtcgccgagcctacgtccgcatcgcctacctgcgcaagaacttcgatcaggagcctctgggcaaggaggtgcccctggaccatgaggttctcctgcagtgccgcccgccggagggggtgcctgtggccgaggtggaatggctcaagaatgaggatgtcatcgaccccacccaggacaccaacttcctgctcaccatcgaccacaacctcatcatccgccaggcccgcctgtcggacactgccaactatacctgcgtggccaagaacatcgtggccaaacgccggagcaccactgccaccgtcatcgtctacgtgaatggcggctggtccagctgggcagagtggtcaccctgctccaaccgctgtggccgaggctggcagaagcgcacccggacctgcaccaaccccgctccactcaacggaggggccttctgcgagggccaggcattccagaagaccgcctgcaccaccatctgcccagtcgatggggcgtggacggagtggagcaagtggtcagcctgcagcactgagtgtgcccactggcgtagccgcgagtgcatggcgcccccaccccagaacggaggccgtgactgcagcgggacgctgctcgactctaagaactgcacagatgggctgtgcatgcaactggaggcctcaggggatgcggcgctgtatgcggggctcgtggtggccatcttcgtggtcgtggcaatcctcatggcggtgggggtggtggtgtaccgccgcaactgccgtgacttcgacacagacatcactgactcatctgctgccctgactggtggtttccaccccgtcaactttaagacggcaaggcccagtaacccgcagctcctacacccctctgtgcctcctgacctgacagccagcgccggcatctaccgcggacccgtgtatgccctgcaggactccaccgacaaaatccccatgaccaactctcctctgctggaccccttacccagccttaaggtcaaggtctacagctccagcaccacgggctctgggccaggcctggcagatggggctgacctgctgggggtcttgccgcctggcacataccctagcgatttcgcccgggacacccacttcctgcacctgcgcagcgccagcctcggttcccagcagctcttgggcctgccccgagacccagggagcagcgtcagcggcacctttggctgcctgggtgggaggctcagcatccccggcacaggggtcagcttgctggtgcccaatggagccattccccagggcaagttctacgagatgtatctactcatcaacaaggcagaaagtaccctgccgctttcagaagggacccagacagtattgagcccctcggtgacctgtggacccacaggcctcctgctgtgccgccccgtcatcctcaccatgccccactgtgccgaagtcagtgcccgtgactggatctttcagctcaagacccaggcccaccagggccactgggaggaggtggtgaccctggatgaggagaccctgaacacaccctgctactgccagctggagcccagggcctgtcacatcctgctggaccagctgggcacctacgtgttcacgggcgagtcctattcccgctcagcagtcaagcggctccagctggccgtcttcgcccccgccctctgcacctccctggagtacagcctccgggtctactgcctggaggacacgcctgtagcactgaaggaggtgctggagctggagcggactctgggcggatacttggtggaggagccgaaaccgctaatgttcaaggacagttaccacaacctgcgcctctccctccatgacctcccccatgcccattggaggagcaagctgctggccaaataccaggagatccccttctatcacatttggagtggcagccagaaggccctccactgcactttcaccctggagaggcacagcttggcctccacagagctcacctgcaagatctgcgtgcggcaagtggaaggggagggccagatattccagctgcataccactctggcagagacacctgctggctccctggacactctctgctctgcccctggcagcactgtcaccacccagctgggaccttatgccttcaagatcccactgtccatccgccagaagatatgcaacagcctagatgcccccaactcacggggcaatgactggcggatgttagcacagaagctctctatggaccggtacctgaattactttgccaccaaagcgagccccacgggtgtgatcctggacctctgggaagctctgcagcaggacgatggggacctcaacagcctggcgagtgccttggaggagatgggcaagagtgagatgctggtggctgtggccaccgacggggactgctga

SEQ ID NO: 2 - protein, 933 aa, Homo sapiens
MGARSGARGALLLALLLCWDPRLSQAGTDSGSEVLPDSFPSAPAEPLPYFLQEPQDAYIVKNKPVELRCRAFPATQIYFKCNGEWVSQNDHVTQEGLDEATGLRVREVQIEVSRQQVEELFGLEDYWCQCVAWSSAGTTKSRRAYVRIAYLRKNFDQEPLGKEVPLDHEVLLQCRPPEGVPVAEVEWLKNEDVIDPTQDTNFLLTIDHNLIIRQARLSDTANYTCVAKNIVAKRRSTTATVIVYVNGGWSSWAEWSPCSNRCGRGWQKRTRTCTNPAPLNGGAFCEGQAFQKTACTTICPVDGAWTEWSKWSACSTECAHWRSRECMAPPPQNGGRDCSGTLLDSKNCTDGLCMQLEASGDAALYAGLVVAIFVVVAILMAVGVVVYRRNCRDFDTDITDSSAALTGGFHPVNFKTARPSNPQLLHPSVPPDLTASAGIYRGPVYALQDSTDKIPMTNSPLLDPLPSLKVKVYSSSTTGSGPGLADGADLLGVLPPGTYPSDFARDTHFLHLRSASLGSQQLLGLPRDPGSSVSGTFGCLGGRLSIPGTGVSLLVPNGAIPQGKFYEMYLLINKAESTLPLSEGTQTVLSPSVTCGPTGLLLCRPVILTMPHCAEVSARDWIFQLKTQAHQGHWEEVVTLDEETLNTPCYCQLEPRACHILLDQLGTYVFTGESYSRSAVKRLQLAVFAPALCTSLEYSLRVYCLEDTPVALKEVLELERTLGGYLVEEPKPLMFKDSYHNLRLSLHDLPHAHWRSKLLAKYQEIPFYHIWSGSQKALHCTFTLERHSLASTELTCKICVRQVEGEGQIFQLHTTLAETPAGSLDTLCSAPGSTVTTQLGPYAFKIPLSIRQKICNSLDAPNSRGNDWRMLAQKLSMDRYLNYFATKASPTGVILDLWEALQQDDGDLNSLASALEEMGKSEMLVAVATDGDC

SEQ ID NO: 3 - DNA, 2860 bp, Homo sapiens
agactggggccagggagacagccctgggggagaggcgcccgaaccaggccgcgggaacatgggggcccggagcggagctcggggcgcgctgctgctggcactgctgctctgctgggacccgaggctgagccaagcaggcactgattctggcagcgaggtgctccctgactccttcccgtcagcgccagcagagccgctgccctacttcctgcaggagccacaggacgcctacattgtgaagaacaagcctgtggagcttcgctgccgcgccttccccgccacacagatctacttcaagtgcaacggcgagtgggtcagccagaacgaccacgtcacacaggaaggcctggatgaggccaccggcctgcgggtgcgcgaggtgcagatcgaggtgtcgcggcagcaggtggaggagctctttgggctggaggattactggtgccagtgcgtggcctggagctccgcaggcaccaccaagagtcgccgagcctacgtccgcatcgcctacctgcgcaagaacttcgatcaggagcctctgggcaaggaggtgcccctggaccatgaggttctcctgcagtgccgcccgccggagggggtgcctgtggccgaggtggaatggctcaagaatgaggatgtcatcgaccccacccaggacaccaacttcctgctcaccatcgaccacaacctcatcatccgccaggcccgcctgtcggacactgccaactatacctgcgtggccaagaacatcgtggccaaacgccggagcaccactgccaccgtcatcgtctacgtgaatggcggctggtccagctgggcagagtggtcaccctgctccaaccgctgtggccgaggctggcagaagcgcacccggacctgcaccaaccccgctccactcaacggaggggccttctgcgagggccaggcattccagaagaccgcctgcaccaccatctgcccagtcgatggggcgtggacggagtggagcaagtggtcagcctgcagcactgagtgtgcccactggcgtagccgcgagtgcatggcgcccccaccccagaacggaggccgtgactgcagcgggacgctgctcgactctaagaactgcacagatgggctgtgcatgcaactggaggcctcaggggatgcggcgctgtatgcggggctcgtggtggccatcttcgtggtcgtggcaatcctcatggcggtgggggtggtggtgtaccgccgcaactgccgtgacttcgacacagacatcactgactcatctgctgccctgactggtggtttccaccccgtcaactttaagacggcaaggcccagtaacccgcagctcctacacccctctgtgcctcctgacctgacagccagcgccggcatctaccgcggacccgtgtatgccctgcaggactccaccgacaaaatccccatgaccaactctcctctgctggaccccttacccagccttaaggtcaaggtctacagctccagcaccacgggctctgggccaggcctggcagatggggctgacctgctgggggtcttgccgcctggcacataccctagcgatttcgcccgggacacccacttcctgcacctgcgcagcgccagcctcggttcccagcagctcttgggcctgccccgagacccagggagcagcgtcagcggcacctttggctgcctgggtgggaggctcagcatccccggcacaggggtcagcttgctggtgcccaatggagccattccccagggcaagttctacgagatgtatctactcatcaacaaggcagaaagtaccctgccgctttcagaagggacccagacagtattgagcccctcggtgacctgtggacccacaggcctcctgctgtgccgccccgtcatcctcaccatgccccactgtgccgaagtcagtgcccgtgactggatctttcagctcaagacccaggcccaccagggccactgggaggaggtggtgaccctggatgaggagaccctgaacacaccctgctactgccagctggagcccagggcctgtcacatcctgctggaccagctgggcacctacgtgttcacgggcgagtcctattcccgctcagcagtcaagcggctccagctggccgtcttcgcccccgccctctgcacctccctggagtacagcctccgggtctactgcctggaggacacgcctgtagcactgaaggaggtgctggagctggagcggactctgggcggatacttggtggaggagccgaaaccgctaatgttcaaggacagttaccacaacctgcgcctctccctccatgacctcccccatgcccattggaggagcaagctgctggccaaataccaggagatccccttctatcacatttggagtggcagccagaaggccctccactgcactttcaccctggagaggcacagcttggcctccacagagctcacctgcaagatctgcgtgcggcaagtggaaggggagggccagatattccagctgcataccactctggcagagacacctgctggctccctggacactctctgctctgcccctggcagcactgtcaccacccagctgggaccttatgccttcaagatcccactgtccatccgccagaagatatgcaacagcctagatgcccccaactcacggggcaatgactggcggatgttagcacagaagctctctatggaccggtacctgaattactttgccaccaaagcgagccccacgggtgtgatcctggacctctgggaagctctgcagcaggacgatggggacctcaacagcctggcgagtgccttggaggagatgggcaagagtgagatgctggtggctgtggccaccgacggggactgctga

SEQ ID NO: 4 - protein, 933 aa, Homo sapiens; identical to SEQ ID NO: 2

SEQ ID NO: 5 - DNA, 6994 bp, Homo sapiens
tgattctactggctgaaaaatgtaataaagatggattttcttatcatttttcttttactttttattgggacttcagagacacaggtagatgtttccaatgtcgttcctggtactaggtacgatataaccatctcttcaatttctacaacatacacctcacctgttactagaataggggcttctaatgaaccagggcctccagtcttcctagccggggaaagagtcggatctgctgggattcttctgtcttggaatacaccacctaatccaaatggaaggattatatcttacattgtcaaatataaggaagtttgtccgtggatgcaaacagtatatacacaagtcagatcaaagccagacagtctggaagttcttcttactaatcttaatcctggaacaacatatgaaattaaggtagctgctgaaaacagtgctggcattggagtgtttagtgatccatttctcttccaaactgcagaaagtgctccaggaaaagtggtggatttcacaggtgaggctgtcccgttcagcagtaagctgatgtggtatacctcggcaaccaaaaaaaaaattaccagcttcaagattagtgtcaagcataacagaagtgggatagtagtgaaagaagtgtcaatcagagtggagtgcattttaagtgcttcccttcctttgcactgcaacgagaatagtgaatcttttttatggagtacagccagcccttctccaacccttggtagagttacacctccatcgcgtaccacacattcatcaagcacgttgacacagaatgagatcagctctgtgaaagagcctatcagttttgtagtgacacacttgagaccttatacaacatatctttttgaagtttcagctgctacaactgaagcaggttatattgatagtacgattgtcagaacaccagaatcagtgcctgaaggaccaccacaaaactgcgtaacaggcaacatcacaggaaagtccttttcaattttatgggacccaccaactatagtaacagggaaatttagttatagagttgaattatatggaccatcagcaggtcgcattttggataacagcacaaaagacctcaagtttgcattcactaacctaacaccatttacaatgtatgatgtctatattgcggctgaaaccagtgcagggactgggcccaagtcaaatatttcagtattcactccaccagatgttccaggggcagtgtttgatttacaacttgcagaggtagaatccacgcaagtaagaattacttggaagaaaccacgacaaccaaatggaattattaaccaataccgagtgaaagtgctagttccagagacaggaataattttggaaaatactttgctcactggaaataatgagataaatgaccccatggctccagaaattgtgaacatagtacagccaatggtaggattatatgagggttcagcagagatgtcgtctgaccttcactcacttgctacatttatatataacagccatccagataaaaactttcctgcaaggaatagagctgaagaccagacttcaccagttgtaactacaaggaatcagtatattactgacattgcagctgaacagctgacttatgttcttatcagattaaggagattttgggctgagacaatggggttttctagatatacaatcatgtcatctgcaagcagggacaatttgacttccccaggccctttgtcagcccaaaatttcagagttacacatgttaccataacagaagtatttttacactgggatcctccagatcctgtattttttcatcattaccttatcactattttggatgttgaaaaccaatccaagagtattattttaaggacattaaacagtttgtctcttgtccttatagggttaaagaaatacacaaaatacaaaatgagagtggcagcctcaacccacgttggagaaagttctttgtctgaagaaaatgacatctttgtgagaacttcagaagatgaaccggaatcatcacctcaagatgtcgaagtaattgatgttaccgcagatgaaataaggttgaagtggtcaccacccgaaaagcccaatgggatcattattgcttatgaagtgctatataaaaatatagatactttatatatgaagaacacatcaacaacagacataatattaaggaacttaagacctcacaccctctataacatttctgtaaggtcttacaccagatttggtcatggcaatcaggtatcttctttactctctgtaaggacttcggagtcagtgcctgatagtgcaccagaaaatatcacttacaaaaatatttcttctggagagattgagctatcattccttcccccaagtagtcccaatggaatcatacaaaaatatacaatttatctcaagagaagtaatggaaatgaggaaagaactataaatacaacctctttaacccaaaacattaaaggtctgaagaaatatacccaatatatcattgaggtgtctgctagtacactcaaaggtgaaggagttcggagtgctcccataagtatactgacggaggaagatgctcctgattctccccctcaagacttctctgtaaaacagttgtctggtgtcacggtgaagttgtcatggcaaccacccctggagccaaatggaattatcctttattacacagtttatgtctggagatcatcattaaaaactattaatgtcactgaaacatcattggagttatcagatttggattataatgttgaatacagtgcttatgtaacagctagcaccagatttggtgatgggaaaacaagaagcaatatcattagctttcaaacaccagagggaccaagcgatcctcccaaagatgtttattatgcaaacctcagttcttcatcaataattcttttctggacacctccttcaaaacctaatgggattatacaatattactctgtttattacagaaatacttcaggtacttttatgcagaattttacactccatgaagtaaccaatgactttgacaatatgactgtatccacaattatagataaactgacaatattcagctactatacattttggttaacagcaagtacttcagttggaaatgggaataaaagcagtgacatcattgaagtatacacagatcaagacgtacctgaagggtttgttggaaacctgacttacgaatccatttcgtcaactgcaataaatgtaagctgggtcccaccggctcaaccaaacggtctagtcttctactatgtttcactgatcttacagcagactcctcgccatgtgagaccacctcttgttacatatgagagaagcatatattttgataatctggaaaaatacactgattatatattaaaaattactccatcaacagaaaagggattctctgatacctatactgcccagctatacatcaagactgaagaagatatcccagaaacttcaccaataatcaacacttttaaaaacctttcctctacctcagttctcttatcatgggatcccccagtaaagccaaatggtgcaataataagttatgatttaactttacaaggaccaaatgaaaattattctttcattacttctgataattacataatattggaagagctttcaccatttacattatatagcttttttgctgccgcaagaactagaaaaggacttggtccttccagtattcttttcttttacacagatgagtcagtgccgttagcacctccacaaaatttgactttaatcaactgtacttcagactttgtatggctgaaatggagcccaagtcctcttccaggtggtattgttaaagtatatagttttaaaattcatgaacatgaaactgacactatatattataagaatatatcaggatttaaaactgaagccaaacttgttggactggaaccagtcagcacctactctatccgtgtatctgcgttcaccaaagttggaaatggcaatcaatttagtaatgtagtaaaattcacaacccaagaatcagttccagatgtcgtgcagaatatgcagtgcatggcaactagctggcagtcagttttagtgaaatgggatccacccaaaaaggcaaatggaataataacgcagtatatggtaacagttgaaaggaattctacaaaagtttctccccaagatcacatgtacactttcataaagcttcttgccaatacctcatatgtctttaaagtaagagcttcaacctcagctggtgaaggtgatgaaagcacatgccatgtcagcacactacctgaaacagttcccagtgttcccacaaatattgctttttctgatgttcagtcaactagtgcaacattgacatggataagacctgacactatccttggctactttcaaaattacaaaattaccactcaacttcgtgctcaaaaatgcaaagaatgggaatccgaagaatgtgttgaatatcaaaaaattcaatacctctatgaagctcacttaactgaagagacagtatatggattaaagaaatttagatggtatagattccaagtggctgccagcaccaatgctggctatggcaatgcttcaaactggatttctacaaaaactctgcctggccctccagatggtcctcctgaaaatgttcatgtagtagcaacatcaccttttagcatcagcataagctggagtgaacctgctgtcattactggaccaacatgttatctgattgatgtcaaatcggtagataatgatgaatttaatatatccttcatcaagtcaaatgaagaaaataaaaccatagaaattaaagatttagaaatattcacaaggtattctgtagtgatcactgcatttactgggaacattagtgctgcatatgtagaagggaagtcaagtgctgaaatgattgttactactttagaatcagccccaaaggacccacctaacaacatgacatttcagaagataccagatgaagttacaaaatttcaattaacgttccttcctccttctcaacctaatggaaatatccaagtatatcaagctctggtttaccgagaagatgatcctactgctgtccagattcacaacctcagtattatacagaaaaccaacacattcgtcattgcaatgctagaaggactaaaaggtggacatacatacaatatcagtgtttacgcagtcaatagtgctggtgcaggtccaaaggttccgatgagaataaccatggatatcaaagctccagcacgaccaaaaaccaaaccaacccctatttatgatgccacaggaaaactgcttgtgacttcaacaacaattacaatcagaatgccaatatgttactacagtgatgatcatggaccaataaaaaatgtacaagtgcttgtgacagaaacaggagctcagcatgatggaaatgtaacaaagtggtatgatgcatattttaataaagcaaggccatattttacaaatgaaggctttcctaaccctccatgtacagaaggaaagacaaagtttagtggcaatgaagaaatctacatcataggtgctgataatgcatgcatgattcctggcaatgaagacaaaatttgcaatggaccactgaaaccaaaaaagcaatacttatttaaatttagagctacaaatattatgggacaatttactgactctgattattctgaccctgttaagactttaggcgaaggactttcagaaagaaccgtagagatcattctttccgtcactttgtgtatcctttcaataattctccttggaacagctatttttgcatttgcaagaattcgacagaagcagaaagaaggtggcacatactctcctcaggatgcagaaattattgacactaaattgaagctggatcagctcatcacagtggcagacctggaactgaaggacgagagattaacgcggccaataagcaagaaatccttcctgcaacatgttgaagagctttgcacaaacaacaacctaaagtttcaagaagaattttcggaattaccaaaatttcttcaggatctttcttcaactgatgctgatctgccttggaatagagcaaaaaaccgcttcccaaacataaaaccatataataataacagagtaaagctgatagctgacgctagtgttccaggttcggattatattaatgccagctatatttctggttatttatgtccaaatgaatttattgctactcaaggtccactaccaggaacagttggagatttttggagaatggtgtgggaaaccagagcaaaaacattagtaatgctaacacagtgttttgaaaaaggacggatcagatgccatcagtattggccagaggacaacaagccagttactgtctttggagatatagtgattacaaagctaatggaggatgttcaaatagattggactatcagggatctgaaaattgaaaggcatggggattgcatgactgttcgacagtgtaactttactgcctggccagagcatggggttcctgagaacagcgcccctctaattcactttgtgaagttggttcgagcaagcagggcacatgacaccacacctatgattgttcactgcagtgctggagttggaagaactggagtttttattgctctggaccatttaacacaacatataaatgaccatgattttgtggatatatatggactagtagctgaactgagaagtgaaagaatgtgcatggtgcagaatctggcacagtatatctttttacaccagtgcattctggatctcttatcaaataagggaagtaatcagcccatctgttttgttaactattcagcacttcagaagatggactctttggacgccatggaaggtggtgatgttgagcttgaatgggaagaaaccactatgtaaatattcagaccaaaggatacaattggaagagatttttaaatcccaggggccaaagttaccccctcattcttccgaattgaaatgtgcaaccttaaagaaatatctatgcttctctcac

SEQ ID NO: 6 - protein, 2281 aa, Homo sapiens
MDFLIIFLLLFIGTSETQVDVSNVVPGTRYDITISSISTTYTSPVTRIGASNEPGPPVFLAGERVGSAGILLSWNTPPNPNGRIISYIVKYKEVCPWMQTVYTQVRSKPDSLEVLLTNLNPGTTYEIKVAAENSAGIGVFSDPFLFQTAESAPGKVVDFTGEAVPFSSKLMWYTSATKKKITSFKISVKHNRSGIVVKEVSIRVECILSASLPLHCNENSESFLWSTASPSPTLGRVTPPSRTTHSSSTLTQNEISSVKEPISFVVTHLRPYTTYLFEVSAATTEAGYIDSTIVRTPESVPEGPPQNCVTGNITGKSFSILWDPPTIVTGKFSYRVELYGPSAGRILDNSTKDLKFAFTNLTPFTMYDVYIAAETSAGTGPKSNISVFTPPDVPGAVFDLQLAEVESTQVRITWKKPRQPNGIINQYRVKVLVPETGIILENTLLTGNNEINDPMAPEIVNIVQPMVGLYEGSAEMSSDLHSLATFIYNSHPDKNFPARNRAEDQTSPVVTTRNQYITDIAAEQLTYVLIRLRRFWAETMGFSRYTIMSSASRDNLTSPGPLSAQNFRVTHVTITEVFLHWDPPDPVFFHHYLITILDVENQSKSIILRTLNSLSLVLIGLKKYTKYKMRVAASTHVGESSLSEENDIFVRTSEDEPESSPQDVEVIDVTADEIRLKWSPPEKPNGIIIAYEVLYKNIDTLYMKNTSTTDIILRNLRPHTLYNISVRSYTRFGHGNQVSSLLSVRTSESVPDSAPENITYKNISSGEIELSFLPPSSPNGIIQKYTIYLKRSNGNEERTINTTSLTQNIKGLKKYTQYIIEVSASTLKGEGVRSAPISILTEEDAPDSPPQDFSVKQLSGVTVKLSWQPPLEPNGIILYYTVYVWRSSLKTINVTETSLELSDLDYNVEYSAYVTASTRFGDGKTRSNIISFQTPEGPSDPPKDVYYANLSSSSIILFWTPPSKPNGIIQYYSVYYRNTSGTFMQNFTLHEVTNDFDNMTVSTIIDKLTIFSYYTFWLTASTSVGNGNKSSDIIEVYTDQDVPEGFVGNLTYESISSTAINVSWVPPAQPNGLVFYYVSLILQQTPRHVRPPLVTYERSIYFDNLEKYTDYILKITPSTEKGFSDTYTAQLYIKTEEDIPETSPIINTFKNLSSTSVLLSWDPPVKPNGAIISYDLTLQGPNENYSFITSDNYIILEELSPFTLYSFFAAARTRKGLGPSSILFFYTDESVPLAPPQNLTLINCTSDFVWLKWSPSPLPGGIVKVYSFKIHEHETDTIYYKNISGFKTEAKLVGLEPVSTYSIRVSAFTKVGNGNQFSNVVKFTTQESVPDVVQNMQCMATSWQSVLVKWDPPKKANGIITQYMVTVERNSTKVSPQDHMYTFIKLLANTSYVFKVRASTSAGEGDESTCHVSTLPETVPSVPTNIAFSDVQSTSATLTWIRPDTILGYFQNYKITTQLRAQKCKEWESEECVEYQKIQYLYEAHLTEETVYGLKKFRWYRFQVAASTNAGYGNASNWISTKTLPGPPDGPPENVHVVATSPFSISISWSEPAVITGPTCYLIDVKSVDNDEFNISFIKSNEENKTIEIKDLEIFTRYSVVITAFTGNISAAYVEGKSSAEMIVTTLESAPKDPPNNMTFQKIPDEVTKFQLTFLPPSQPNGNIQVYQALVYREDDPTAVQIHNLSIIQKTNTFVIAMLEGLKGGHTYNISVYAVNSAGAGPKVPMRITMDIKAPARPKTKPTPIYDATGKLLVTSTTITIRMPICYYSDDHGPIKNVQVLVTETGAQHDGNVTKWYDAYFNKARPYFTNEGFPNPPCTEGKTKFSGNEEIYIIGADNACMIPGNEDKICNGPLKPKKQYLFKFRATNIMGQFTDSDYSDPVKTLGEGLSERTVEIILSVTLCILSIILLGTAIFAFARIRQKQKEGGTYSPQDAEIIDTKLKLDQLITVADLELKDERLTRPISKKSFLQHVEELCTNNNLKFQEEFSELPKFLQDLSSTDADLPWNRAKNRFPNIKPYNNNRVKLIADASVPGSDYINASYISGYLCPNEFIATQGPLPGTVGDFWRMVWETRAKTLVMLTQCFEKGRIRCHQYWPEDNKPVTVFGDIVITKLMEDVQIDWTIRDLKIERHGDCMTVRQCNFTAWPEHGVPENSAPLIHFVKLVRASRAHDTTPMIVHCSAGVGRTGVFIALDHLTQHINDHDFVDIYGLVAELRSERMCMVQNLAQYIFLHQCILDLLSNKGSNQPICFVNYSALQKMDSLDAMEGGDVELEWEETTM

SEQ ID NO: 7 - DNA, 2565 bp, Homo sapiens
agatctcctgaagggtttgttggaaacctgacttacgaatccatttcgtcaactgcaataaatgtaagctgggtcccaccggctcaaccaaacggtctagtcttctactatgtttcactgatcttacagcagactcctcgccatgtgagaccacctcttgttacatatgagagaagcatatattttgataatctggaaaaatacactgattatatattaaaaattactccatcaacagaaaagggattctctgatacctatactgcccagctatacatcaagactgaagaagatgtcccagaaacttcaccaataatcaacacttttaaaaacctttcctctacctcagttctcttatcatgggatcccccagtaaagccaaatggtgcaataataagttatgatttaactttacaaggaccaaatgaaaattattctttcattacttctgataattacataatattggaagagctttcaccatttacattatatagcttttttgctgccgcaagaactagaaaaggacttggtccttccagtattcttttcttttacacagatgagtcagtgccgttagcacctccacaaaatttgactttaatcaactgtacttcagactttgtatggctgaaatggagcccaagtcctcttccaggtggtattgttaaagtatatagttttaaaattcatgaacatgaaactgacactatatattataagaatatatcaggatttaaaactgaagccaaacttgttggactggaaccagtcagcacctactctatccgtgtatctgcgttcaccaaagttggaaatggcaatcaatttagtaatgtagtaaaattcacaacccaagaatcagttccagatgtcgtgcagaatatgcagtgcatggcaactagctggcagtcagttttagtgaaatgggatccacccaaaaaggcaaatggaataataacgcagtatatggtaacagttgaaaggaattctacaaaagtttctccccaagatcacatgtacactttcataaagcttcttgccaatacctcatatgtctttaaagtaagagcttcaacctcagctggtgaaggtgatgaaagcacatgccatgtcagcacactacctgaaacagttcccagtgttcccacaaatattgctttttctgatgttcagtcaactagtgcaacattgacatggataagacctgacactatccttggctactttcaaaattacaaaattaccactcaacttcgtgctcaaaaatgcaaagaatgggaatccgaagaatgtgttgaatatcaaaaaattcaatacctctatgaagctcacttaactgaagagacagtatatggattaaagaaatttagatggtatagattccaagtggctgccagcaccaatgctggctatggcaatgcttcaaactggatttctacaaaaactctgcctggccctccagatggtcctcctgaaaatgttcatgtagtagcaacatcaccttttagcatcagcataagctggagtgaacctgctgtcattactggaccaacatgttatctgattgatgtcaaatcggtagataatgatgaatttaatatatccttcatcaagtcaaatgaagaaaataaaaccatagaaattaaagatttagaaatattcacaaggtattctgtagtgatcactgcatttactgggaacattagtgctgcatatgtagaagggaagtcaagtgctgaaatgattgttactactttagaatcagccccaaaggacccacctaacaacatgacatttcagaagataccagatgaagttacaaaatttcaattaacgtcccttcctccttctcaacctaatggaaatatccaagtatatcaagctctggtttaccgagaagatgatcctactgctgtccagattcacaacctcagtattatacagaaaaccaacacattcgtcattgcaatgctagaaggactaaaaggtggacatacatacaatatcagtgtttacgcagtcaatagtgctggtgcaggtccaaaggttccgatgagaataaccatggatatcaaagctccagcacgaccaaaaaccaaaccaacccctatttatgatgccacaggaaaactgcttgtgacttcaacaacaattacaatcagaatgccaatatgttactacagtgatgatcatggaccaataaaaaatgtacaagtgcttgtgacagaaacaggagctcagcatgatggaaatgtaacaaagtggtatgatgcatattttaataaagcaaggccatattttacaaatgaaggctttcctaaccctccatgtacagaaggaaagacaaagtttagtggcaatgaagaaatctacatcataggtgctgataatgcatgcatgattcctggcaatgaagacaaaatttgcaatggaccactgaaaccaaaaaagcaatacttatttaaatttagagctacaaatattatgggacaatttactgactctgattattctgaccctgttaagactttaggcgaaggactttcagaaagaaccctcgag

SEQ ID NO: 8 - protein, 855 aa, Homo sapiens
RSPEGFVGNLTYESISSTAINVSWVPPAQPNGLVFYYVSLILQQTPRHVRPPLVTYERSIYFDNLEKYTDYILKITPSTEKGFSDTYTAQLYIKTEEDVPETSPIINTFKNLSSTSVLLSWDPPVKPNGAIISYDLTLQGPNENYSFITSDNYIILEELSPFTLYSFFAAARTRKGLGPSSILFFYTDESVPLAPPQNLTLINCTSDFVWLKWSPSPLPGGIVKVYSFKIHEHETDTIYYKNISGFKTEAKLVGLEPVSTYSIRVSAFTKVGNGNQFSNVVKFTTQESVPDVVQNMQCMATSWQSVLVKWDPPKKANGIITQYMVTVERNSTKVSPQDHMYTFIKLLANTSYVFKVRASTSAGEGDESTCHVSTLPETVPSVPTNIAFSDVQSTSATLTWIRPDTILGYFQNYKITTQLRAQKCKEWESEECVEYQKIQYLYEAHLTEETVYGLKKFRWYRFQVAASTNAGYGNASNWISTKTLPGPPDGPPENVHVVATSPFSISISWSEPAVITGPTCYLIDVKSVDNDEFNISFIKSNEENKTIEIKDLEIFTRYSVVITAFTGNISAAYVEGKSSAEMIVTTLESAPKDPPNNMTFQKIPDEVTKFQLTSLPPSQPNGNIQVYQALVYREDDPTAVQIHNLSIIQKTNTFVIAMLEGLKGGHTYNISVYAVNSAGAGPKVPMRITMDIKAPARPKTKPTPIYDATGKLLVTSTTITIRMPICYYSDDHGPIKNVQVLVTETGAQHDGNVTKWYDAYFNKARPYFTNEGFPNPPCTEGKTKFSGNEEIYIIGADNACMIPGNEDKICNGPLKPKKQYLFKFRATNIMGQFTDSDYSDPVKTLGEGLSERTLE

SEQ ID NO: 9 - DNA, 6903 bp, Homo sapiens
atggattttcttatcatttttcttttactttttattgggacttcagagacacaggtagatgtttccaatgtcgttcctggtactaggtacgatataaccatctcttcaatttctacaacatacacctcacctgttactagaatagtgacaacaaatgtaacagaaccagggcctccagtcttcctagccggggaaagagtcggatctgctgggattcttctgtcttggaatacaccacctaatccaaatggaaggattatatcttacattgtcaaatataaggaagtttgtccgtggatgcaaacagtatatacacaagtcagatcaaagccagacagtctggaagttcttcttactaatcttaatcctggaacaacatatgaaattaaggtagctgctgaaaacagtgctggcattggagtgtttagtgatccatttctcttccaaactgcagaaagtccagctccaggaaaagtggtgaatctcacagttgaggcctacaacgcttcagcagttaagctgatttggtatttacctcggcaaccaaatggcaaaattaccagcttcaagattagtgtcaagcatgccagaagtgggatagtagtgaaagatgtctcaatcagagtagaggacattttgactgggaaattgccagaatgcaatgtagagaatagtgaatcttttttatggagtacagccagcccttctccaacccttggtagagttacacctccatcgcgtaccacacattcatcaagcacgttgacacagaatgagatcagctctgtgtggaaagagcctatcagttttgtagtgacacacttgagaccttatacaacatatctttttgaagtttcagctgctacaactgaagcaggttatattgatagtacgattgtcagaacaccagaatcagtgcctgaaggaccaccacaaaactgcgtaacaggcaacatcacaggaaagtccttttcaattttatgggacccaccaactatagtaacagggaaatttagttatagagttgaattatatggaccatcaggtcgcattttggataacagcacaaaagacctcaagtttgcattcactaacctaacaccatttacaatgtatgatgtctatattgcggctgaaaccagtgcagggactgggcccaagtcaaatatttcagtattcactccaccagatgttccaggggcagtgtttgatttacaacttgcagaggtagaatccacgcaagtaagaattacttggaagaaaccacgacaaccaaatggaattattaaccaataccgagtgaaagtgctagttccagagacaggaataattttggaaaatactttgctcactggaaataatgagataaatgaccccatggctccagaaattgtgaacatagtagagccaatggtaggattatatgagggttcagcagagatgtcgtctgaccttcactcacttgctacatttatatataacagccatccagataaaaactttcctgcaaggaatagagctgaagaccagacttcaccagttgtaactacaaggaatcagtatattactgacattgcagctgaacagctgtcttatgttatcaggagacttgtacctttcactgagcacatgattagtgtatctgctttcaccatcatgggagaaggaccaccaacagttctcagtgttaggacacgtcagcaagtgccaagctccattaaaattataaactataaaaatattagttcttcatctattttgttatattgggatcctccagaatatcccaatggaaaaataactcactatacgatttatgcaatggaattggatacaaacagagcattccagataactaccatagataacagctttctcataacaggtatagggttaaagaaatacacaaaatacaaaatgagagtggcagcctcaacccacgttggagaaagttctttgtctgaagaaaatgacatctttgtgagaacttcagaagatgaaccggaatcatcacctcaagatgtcgaagtaattgatgttaccgcagatgaaataaggttgaagtggtcaccacccgaaaagcccaatgggatcattattgcttatgaagtgctatataaaaatatagatactttatatatgaagaacacatcaacaacagacataatattaaggaacttaagacctcacaccctctataacatttctgtaaggtcttacaccagatttggtcatggcaatcaggtatcttctttactctctgtaaggacttcggagactgtgcctgatagtgcaccagaaaatatcacttacaaaaatatttcttctggagagattgagctatcattccttcccccaagtagtcccaatggaatcatacaaaaatatacaatttatctcaagagaagtaatggaaatgaggaaagaactataaatacaacctctttaacccaaaacattctgaagaaatatacccaatatatcattgaggtgtctgctagtacactcaaaggtgaaggagttcggagtgctcccataagtatactgacggaggaagatgctcctgattctccccctcaagacttctctgtaaaacagttgtctggtgtcacggtgaagttgtcatggcaaccacccctggagccaaatggaattatcctttattacacagtttatgtctggaggaatagatcatcattaaaaactattaatgtcactgaaacatcattggagttatcagatttggattataatgttgaatacagtgcttatgtaacagctagcaccagatttggtgatgggaaaacaagaagcaatatcattagctttcaaacaccagagggaccaagcgatcctcccaaagatgtttattatgcaaacctcagttcttcatcaataattcttttctggacacctccttcaaaacctaatgggattatacaatattactctgtttattacagaaatacttcaggtacttttatgcagaattttacactccatgaagtaaccaatgactttgacaatatgactgtatccacaattatagataaactgacaatattcagctactatacattttggttaacagcaagtacttcagttggaaatgggaataaaagcagtgacatcattgaagtatacacagatcaagacgtccctgaagggtttgttggaaacctgacttacgaatccatttcgtcaactgcaataaatgtaagctgggtcccaccggctcaaccaaacggtctagtcttctactatgtttcactgatcttacagcagactcctcgccatgtgagaccacctcttgttacatatgagagaagcatatattttgataatctggaaaaatacactgattatatattaaaaattactccatcaacagaaaagggattctctgatacctatactgcccagctatacatcaagactgaagaagatgtcccagaaacttcaccaataatcaacacttttaaaaacctttcctctacctcagttctcttatcatgggatcccccagtaaagccaaatggtgcaataataagttatgatttaactttacaaggaccaaatgaaaattattctttcattacttctgataattacataatattggaagagctttcaccatttacattatatagcttttttgctgccgcaagaactagaaaaggacttggtccttccagtattcttttcttttacacagatgagtcagtgccgttagcacctccacaaaatttgactttaatcaactgtacttcagactttgtatggctgaaatggagcccaagtcctcttccaggtggtattgttaaagtatatagttttaaaattcatgaacatgaaactgacactatatattataagaatatatcaggatttaaaactgaagccaaacttgttggactggaaccagtcagcacctactctatccgtgtatctgcgttcaccaaagttggaaatggcaatcaatttagtaatgtagtaaaattcacaacccaagaatcagttccagatgtcgtgcagaatatgcagtgcatggcaactagctggcagtcagttttagtgaaatgggatccacccaaaaaggcaaatggaataataacgcagtatatggtaacagttgaaaggaattctacaaaagtttctccccaagatcacatgtacactttcataaagcttcttgccaatacctcatatgtctttaaagtaagagcttcaacctcagctggtgaaggtgatgaaagcacatgccatgtcagcacactacctgaaacagttcccagtgttcccacaaatattgctttttctgatgttcagtcaactagtgcaacattgacatggataagacctgacactatccttggctactttcaaaattacaaaattaccactcaacttcgtgctcaaaaatgcaaagaatgggaatccgaagaatgtgttgaatatcaaaaaattcaatacctctatgaagctcacttaactgaagagacagtatatggattaaagaaatttagatggtatagattccaagtggctgccagcaccaatgctggctatggcaatgcttcaaactggatttctacaaaaactctgcctggccctccagatggtcctcctgaaaatgttcatgtagtagcaacatcaccttttagcatcagcataagctggagtgaacctgctgtcattactggaccaacatgttatctgattgatgtcaaatcggtagataatgatgaatttaatatatccttcatcaagtcaaatgaagaaaataaaaccatagaaattaaagatttagaaatattcacaaggtattctgtagtgatcactgcatttactgggaacattagtgctgcatatgtagaagggaagtcaagtgctgaaatgattgttactactttagaatcagccccaaaggacccacctaacaacatgacatttcagaagataccagatgaagttacaaaatttcaattaacgtcccttcctccttctcaacctaatggaaatatccaagtatatcaagctctggtttaccgagaagatgatcctactgctgtccagattcacaacctcagtattatacagaaaaccaacacattcgtcattgcaatgctagaaggactaaaaggtggacatacatacaatatcagtgtttacgcagtcaatagtgctggtgcaggtccaaaggttccgatgagaataaccatggatatcaaagctccagcacgaccaaaaaccaaaccaacccctatttatgatgccacaggaaaactgcttgtgacttcaacaacaattacaatcagaatgccaatatgttactacagtgatgatcatggaccaataaaaaatgtacaagtgcttgtgacagaaacaggagctcagcatgatggaaatgtaacaaagtggtatgatgcatattttaataaagcaaggccatattttacaaatgaaggctttcctaaccctccatgtacagaaggaaagacaaagtttagtggcaatgaagaaatctacatcataggtgctgataatgcatgcatgattcctggcaatgaagacaaaatttgcaatggaccactgaaaccaaaaaagcaatacttatttaaatttagagctacaaatattatgggacaatttactgactctgattattctgaccctgttaagactttaggcgaaggactttcagaaagaaccctagagatcattctttccgtcactttgtgtatcctttcaataattctccttggaacagctatttttgcatttgcaagaattcgacagaagcagaaagaaggtggcacatactctcctcaggatgcagaaattattgacactaaattgaagctggatcagctcatcacagtggcagacctggaactgaaggacgagagattaacgcggttacttagttatagaaaatccatcaagccaataagcaagaaatccttcctgcaacatgttgaagagctttgcacaaacaacaacctaaagtttcaagaagaattttcggaattaccaaaatttcttcaggatctttcttcaactgatgctgatctgccttggaatagagcaaaaaaccgcttcccaaacataaaaccatataataataacagagtaaagctgatagctgacgctagtgttccaggttcggattatattaatgccagctatatttctggttatttatgtccaaatgaatttattgctactcaaggtccactaccaggaacagttggagatttttggagaatggtgtgggaaaccagagcaaaaacattagtaatgctaacacagtgttttgaaaaaggacggatcagatgccatcagtattggccagaggacaacaagccagttactgtctttggagatatagtgattacaaagctaatggaggatgttcaaatagattggactatcagggatctgaaaattgaaaggcatggggattgcatgactgttcgacagtgtaactttactgcctggccagagcatggggttcctgagaacagcgcccctctaattcactttgtgaagttggttcgagcaagcagggcacatgacaccacacctatgattgttcactgtagtgctggagttggaagaactggagtttttattgctctggaccatttaacacaacatataaatgaccatgattttgtggatatatatggactagtagctgaactgagaagtgaaagaatgtgcatggtgcagaatctggcacagtatatctttttacaccagtgcattctggatctcttatcaaataagggaagtaatcagcccatctgttttgttaactattcagcacttcagaagatggactctttggacgccatggaaggtgatgttgagcttgaatgggaagaaaccactatgtaa

SEQ ID NO: 10 - protein, 2300 aa, Homo sapiens
MDFLIIFLLLFIGTSETQVDVSNVVPGTRYDITISSISTTYTSPVTRIVTTNVTEPGPPVFLAGERVGSAGILLSWNTPPNPNGRIISYIVKYKEVCPWMQTVYTQVRSKPDSLEVLLTNLNPGTTYEIKVAAENSAGIGVFSDPFLFQTAESPAPGKVVNLTVEAYNASAVKLIWYLPRQPNGKITSFKISVKHARSGIVVKDVSIRVEDILTGKLPECNVENSESFLWSTASPSPTLGRVTPPSRTTHSSSTLTQNEISSVWKEPISFVVTHLRPYTTYLFEVSAATTEAGYIDSTIVRTPESVPEGPPQNCVTGNITGKSFSILWDPPTIVTGKFSYRVELYGPSGRILDNSTKDLKFAFTNLTPFTMYDVYIAAETSAGTGPKSNISVFTPPDVPGAVFDLQLAEVESTQVRITWKKPRQPNGIINQYRVKVLVPETGIILENTLLTGNNEINDPMAPEIVNIVEPMVGLYEGSAEMSSDLHSLATFIYNSHPDKNFPARNRAEDQTSPVVTTRNQYITDIAAEQLSYVIRRLVPFTEHMISVSAFTIMGEGPPTVLSVRTRQQVPSSIKIINYKNISSSSILLYWDPPEYPNGKITHYTIYAMELDTNRAFQITTIDNSFLITGIGLKKYTKYKMRVAASTHVGESSLSEENDIFVRTSEDEPESSPQDVEVIDVTADEIRLKWSPPEKPNGIIIAYEVLYKNIDTLYMKNTSTTDIILRNLRPHTLYNISVRSYTRFGHGNQVSSLLSVRTSETVPDSAPENITYKNISSGEIELSFLPPSSPNGIIQKYTIYLKRSNGNEERTINTTSLTQNILKKYTQYIIEVSASTLKGEGVRSAPISILTEEDAPDSPPQDFSVKQLSGVTVKLSWQPPLEPNGIILYYTVYVWRNRSSLKTINVTETSLELSDLDYNVEYSAYVTASTRFGDGKTRSNIISFQTPEGPSDPPKDVYYANLSSSSIILFWTPPSKPNGIIQYYSVYYRNTSGTFMQNFTLHEVTNDFDNMTVSTIIDKLTIFSYYTFWLTASTSVGNGNKSSDIIEVYTDQDVPEGFVGNLTYESISSTAINVSWVPPAQPNGLVFYYVSLILQQTPRHVRPPLVTYERSIYFDNLEKYTDYILKITPSTEKGFSDTYTAQLYIKTEEDVPETSPIINTFKNLSSTSVLLSWDPPVKPNGAIISYDLTLQGPNENYSFITSDNYIILEELSPFTLYSFFAAARTRKGLGPSSILFFYTDESVPLAPPQNLTLINCTSDFVWLKWSPSPLPGGIVKVYSFKIHEHETDTIYYKNISGFKTEAKLVGLEPVSTYSIRVSAFTKVGNGNQFSNVVKFTTQESVPDVVQNMQCMATSWQSVLVKWDPPKKANGIITQYMVTVERNSTKVSPQDHMYTFIKLLANTSYVFKVRASTSAGEGDESTCHVSTLPETVPSVPTNIAFSDVQSTSATLTWIRPDTILGYFQNYKITTQLRAQKCKEWESEECVEYQKIQYLYEAHLTEETVYGLKKFRWYRFQVAASTNAGYGNASNWISTKTLPGPPDGPPENVHVVATSPFSISISWSEPAVITGPTCYLIDVKSVDNDEFNISFIKSNEENKTIEIKDLEIFTRYSVVITAFTGNISAAYVEGKSSAEMIVTTLESAPKDPPNNMTFQKIPDEVTKFQLTSLPPSQPNGNIQVYQALVYREDDPTAVQIHNLSIIQKTNTFVIAMLEGLKGGHTYNISVYAVNSAGAGPKVPMRITMDIKAPARPKTKPTPIYDATGKLLVTSTTITIRMPICYYSDDHGPIKNVQVLVTETGAQHDGNVTKWYDAYFNKARPYFTNEGFPNPPCTEGKTKFSGNEEIYIIGADNACMIPGNEDKICNGPLKPKKQYLFKFRATNIMGQFTDSDYSDPVKTLGEGLSERTLEIILSVTLCILSIILLGTAIFAFARIRQKQKEGGTYSPQDAEIIDTKLKLDQLITVADLELKDERLTRLLSYRKSIKPISKKSFLQHVEELCTNNNLKFQEEFSELPKFLQDLSSTDADLPWNRAKNRFPNIKPYNNNRVKLIADASVPGSDYINASYISGYLCPNEFIATQGPLPGTVGDFWRMVWETRAKTLVMLTQCFEKGRIRCHQYWPEDNKPVTVFGDIVITKLMEDVQIDWTIRDLKIERHGDCMTVRQCNFTAWPEHGVPENSAPLIHFVKLVRASRAHDTTPMIVHCSAGVGRTGVFIALDHLTQHINDHDFVDIYGLVAELRSERMCMVQNLAQYIFLHQCILDLLSNKGSNQPICFVNYSALQKMDSLDAMEGDVELEWEETTM

SEQ ID NO: 11 - DNA, 4538 bp, Homo sapiens
catgaaggaaaaattctgagtattctaatggctttttaaaataatcatttatttgctaggtaagttctcttctacgctgtatgagactggtggctgtgatatgtcacttgtgaattttgaaccagcagcaagaagagcatccaatatctgggacacagattctcatgtatccagttctacctcagttcgattttatccacatgatgtgattcgattgaatagactattgaccattgatacagatttgttggagcaacaggacattgatctaagccctgacttggcagctacttacggcccaacagaagaagctgcccaaaaggttaaacactattatcgcttttggatcctaccccagctgtggattggcattaactttgacagactcacacttttggccctgtttgataggaatcgtgagatcctggaaaatgtgttagctgtcatcctggctattctcgtggcctttttgggatctattcttctcatacaaggattcttcagagatatctgggtcttccagttctgcctcgtcatagccagctgtcaatactcactgcttaagagtgttcaaccagattcttcttctcccagacatggtcataatcgtatcattgcctacagtagaccagtttatttctgcatatgttgcggtcttatttggctcttggattatggtagcagaaacctgactgcaaccaagttcaaattatatggaataactttcaccaatccactggtgtttatatcagccagggatttagttatagtgtttacactctgtttcccaatagtgtttttcattggtctcctgcctcaggtgaatacatttgtaatgtacctttgtgaacaattggatattcatatttttggtggtaatgccactacaagcctgcttgcagcactttacagttttatctgtagcattgttgcagtagccttattgtatggattatgttatggggctttacaggattcttgggatggccagcatattccagtacttttctccattttttgtggtttattagtggcagtgtcttaccatctcagccgacaaagcagtgatccatctgtacttagctctttagtgcaatccaagatttttccaaaaacggaagagaaaaatccagaagaccctctatctgaagtaaaagatccactgcctgaaaaacttagaaattctgttagtgagcgattacagtctgacctggtagtatgcattgtaattggtgtgctgtattttgctattcatgtaagcacagtcttcacagtattgcagcctgccctcaagtatgtgttgtatacattggttggctttgtgggttttgtaacccattatgtgctgcctcaagttagaaaacagctaccatggcactgtttctctcatcctctgctaaagacactagagtataatcagtatgaagttcgagatgcagccactatgatgtggtttgagaaacttcatgtgtggcttctttttgtggagaagaatataatctatccattgattgttctcaatgaactgagcagcagtgcagagacaattgctagtccaaagaaactgaatacagagttaggtgctttaatgatcactgttgctggtttgaagttgctacgatcctcttttagcagccctacatatcagtatgttacagtcatctttactgtgctgtttttcaaatttgactatgaagctttttcagagaccatgctgttggatctcttctttatgtccatactcttcaacaagctttgggaactactttataaattgcagtttgtgtatacctatattgccccatggcagatcacatggggttctgctttccatgcttttgctcagccttttgcagtgcctcgttcagccatgctgtttattcaggctgctgtctcggccttcttctctactccactgaacccctttctgggaagtgcaatattcatcacttcatatgtccgacctgtgaaattctgggagagagactatagcacaaaacgagtggatcattcaaataccagattggcttcccagcttgatagaaatccaggttcagatgacaacaatctgaattccatcttttatgagcatttaactagatccctacagcacagcctctgtggtgatttgctactaggacggtggggaaactacagtacaggggactgtttcatccttgcctctgactatctcaatgcattagtacaccttatagagataggcaatggtctggtcacttttcagctgcggggacttgaattcagaggtacctactgtcaacaacgggaagtggaggccattactgaaggtgtagaggaagatgaaggattttgctgttgtgaacctggccatattcctcacatgctttcatttaatgctgcatttagccagcgatggctagcttgggaagtgatagtcacaaagtacattctggagggttatagcatcactgataacagtgctgcttctatgcttcaagtctttgatcttcggaaagtactcaccacttactatgtcaagggtatcatttattatgttacgacctcgtctaagctagaggagtggctagctaatgagacaatgcaggaaggacttcgtctgtgtgctgatcgcaattatgtcgatgtggacccgacctttaatccaaacattgatgaagactatgaccaccgactggcaggcatatctagggagagtttctgtgtgatttacctcaactggatagagtactgctcttcccgaagagcaaagcctgtggatgtggacaaagattcatccctagtgactctctgttatggactctgtgttctgggacggagagctttggggactgcatcccatcatatgtccagtaatttagagtcattcctctatggattgcatgccctatttaaaggagatttccgtatttcttcaattcgagatgaatggatctttgctgacatggaattgctaagaaaagtagtagtccctgggatccgtatgtccattaaacttcatcaggatcattttacttctccagatgaatatgatgaccctactgtgctctatgaagccatagtatctcatgagaagaacctcgtaatagcccatgaaggggaccctgcatggcggagtgcagtacttgccaactctccctccttgcttgctctgcggcatgtcatggatgatggcaccaatgaatataaaatcatcatgctcaacagacgctacctgagcttcagggtcattaaagtgaataaggaatgtgtccgaggtctttgggcagggcaacagcaggagcttgtttttctacgtaaccgtaacccagagagaggtagcatccaaaatgcaaagcaagccctgagaaacatgataaactcatcttgtgatcaacctattggctacccaatctttgtctcacccctgacaacttcttactctgacagccacgaacagcttaaagacattcttgggggtcctatcagcttgggaaatatcaggaacttcatagtgtcaacctggcacaggcttaggaaaggttgcggagctggatgtaacagtggtggcaatattgaagattctgatactggaggtgggacttcctgcactggtaacaatgcaacaactgccaacaatccccacagcaacgtgacccagggaagcattggaaatcctgggcagggatcaggaactggactccacccacctgtcacatcttatcctccaacactaggtactagccacagctctcactctgtgcagtcgggcctggtcagacagtctcctgcccgggcctcagtagccagccagtcttcctactgctatagcagccggcattcatccctccggatgtccaccactgggtttgtgccttgtcggcgctcttctactagtcagatatcgcttcgaaacttgccatcatccatccaatcccgactgtcgatggtgaaccaaatggaaccctcaggtcagagcggcctggcctgtgtgcagcacggcctgccttcctccagcagctccagccaaagcatcccagcctgcaaacatcacactctcgtgggctttcttgcgacagagggaggtcagagcagtgccactgatgcacagccaggcaacaccttaagtcctgccaacaattcacactccagaaaggcagaagtgatttacagagtccaaattgtggatcccagtcaaattctggaagggatcaacctgtctaaaaggaaagagctacagtggcctgatgaaggaatccggttaaaagctgggagaaatagctggaaagactggagtccgcaggagggcatggaaggccatgtgattcaccgatgggtgccttgcagcagagatccaggtaccagatcccacatcgacaaggcagtgcttctggtccagattgatgataaatatgtgactgtaattgaaactggggtactagaacttggggctgaagtgtgagccagtgtttattataaagacatttctttttccctctcaattccaaggcattggaaaaagagaggaacaagcagaagatgcctgcaggtatcacttt

SEQ ID NO: 12 - protein, 1446 aa, Homo sapiens
MSLVNFEPAARRASNIWDTDSHVSSSTSVRFYPHDVIRLNRLLTIDTDLLEQQDIDLSPDLAATYGPTEEAAQKVKHYYRFWILPQLWIGINFDRLTLLALFDRNREILENVLAVILAILVAFLGSILLIQGFFRDIWVFQFCLVIASCQYSLLKSVQPDSSSPRHGHNRIIAYSRPVYFCICCGLIWLLDYGSRNLTATKFKLYGITFTNPLVFISARDLVIVFTLCFPIVFFIGLLPQVNTFVMYLCEQLDIHIFGGNATTSLLAALYSFICSIVAVALLYGLCYGALQDSWDGQHIPVLFSIFCGLLVAVSYHLSRQSSDPSVLSSLVQSKIFPKTEEKNPEDPLSEVKDPLPEKLRNSVSERLQSDLVVCIVIGVLYFAIHVSTVFTVLQPALKYVLYTLVGFVGFVTHYVLPQVRKQLPWHCFSHPLLKTLEYNQYEVRDAATMMWFEKLHVWLLFVEKNIIYPLIVLNELSSSAETIASPKKLNTELGALMITVAGLKLLRSSFSSPTYQYVTVIFTVLFFKFDYEAFSETMLLDLFFMSILFNKLWELLYKLQFVYTYIAPWQITWGSAFHAFAQPFAVPRSAMLFIQAAVSAFFSTPLNPFLGSAIFITSYVRPVKFWERDYSTKRVDHSNTRLASQLDRNPGSDDNNLNSIFYEHLTRSLQHSLCGDLLLGRWGNYSTGDCFILASDYLNALVHLIEIGNGLVTFQLRGLEFRGTYCQQREVEAITEGVEEDEGFCCCEPGHIPHMLSFNAAFSQRWLAWEVIVTKYILEGYSITDNSAASMLQVFDLRKVLTTYYVKGIIYYVTTSSKLEEWLANETMQEGLRLCADRNYVDVDPTFNPNIDEDYDHRLAGISRESFCVIYLNWIEYCSSRRAKPVDVDKDSSLVTLCYGLCVLGRRALGTASHHMSSNLESFLYGLHALFKGDFRISSIRDEWIFADMELLRKVVVPGIRMSIKLHQDHFTSPDEYDDPTVLYEAIVSHEKNLVIAHEGDPAWRSAVLANSPSLLALRHVMDDGTNEYKIIMLNRRYLSFRVIKVNKECVRGLWAGQQQELVFLRNRNPERGSIQNAKQALRNMINSSCDQPIGYPIFVSPLTTSYSDSHEQLKDILGGPISLGNIRNFIVSTWHRLRKGCGAGCNSGGNIEDSDTGGGTSCTGNNATTANNPHSNVTQGSIGNPGQGSGTGLHPPVTSYPPTLGTSHSSHSVQSGLVRQSPARASVASQSSYCYSSRHSSLRMSTTGFVPCRRSSTSQISLRNLPSSIQSRLSMVNQMEPSGQSGLACVQHGLPSSSSSSQSIPACKHHTLVGFLATEGGQSSATDAQPGNTLSPANNSHSRKAEVIYRVQIVDPSQILEGINLSKRKELQWPDEGIRLKAGRNSWKDWSPQEGMEGHVIHRWVPCSRDPGTRSHIDKAVLLVQIDDKYVTVIETGVLELGAEV

SEQ ID NO: 13 - DNA, 1500 bp, Homo sapiens
tcatcttaaatttttttagctgatatagttgtaatttcttaacctagctcatctctagaggatatgtaaaaacataaaacacctcaattacttgtgaattatagaggtgtatcagttggtttaaaagtgcttttattgggctgagctcttggaagactcaggtccttgggtcataggcatcatggaccaatctgaagaaaactgcatttcagggcctgttgaggctaaaactccagttggaggtccagaacatgttctcgtgactcagcaatttccttgtcagaatccattacctgcaaatagtggccaggctcagtgggtcttgtgtccttcaaattcttcgcagcgtgttcctttgcaagcacaaaagcttgtctccagtcacaagccagttcagaatcagaagcagaagcaattgcaggcaaccagtgtacctcatcctgcctccaggccactgaataacacccaaaacagcaagcagtccccgctgtcggcacctgaaaataatcctgaggaggaactggcatcaaaacagaaaaatgaagaatcaaaaaagaggcaatgggctttggaagaccttgaaattggtcgccctccgggtaaaggaaagtttggtaatgtttatttggcaagagaaaaacaaagcaagtttattctggctcttagggtgttatttaaagctcagctggagaaagcaggagtggagcatcaactcagaagagaagtagaaatacagtcccacctccaacatcctaatataatcagactgtatggttatttccatgatgccaccagagtctacctaattctggaatatacaccacttgaaacagtcaatacagaacttcagaaactttcaaagtttgatgagcagagaactgctacttatatcacagaattggcaagtgccctgtcttactgtcattcaaaaacagttattcatagagacattaagccagagaacttacttcttggatcagctggagagcttgaaattgcaaattttgggtggtcagaacatgctccatcttccaggaggaccactctctgtggcaccctggactacctgccccccgaaatgattgaaggtcggatgcatgatgagaaggtggatctctggagccttggagttctttgctgtgaatttttagttgggaagcctccttttgaggcaaatacataccaagagacctacaaaagaatatcacgggttgagttcacattccctgactttgtaacagagggagccagggacctcatttcaagactgttgaagcatgttcccagccagaggccaatgctcagagaagtacttgaatacccctggatcacagcaaattcatcaaaaccatcaaattgccaaaacaaagaatcaactagcaagtattcttaggaatcgtgcagggggagaaatccttgagccagggctgctgtataacctctcaggaacatgctaccaaaatttattttaccattgactgctgccctcaatctagaaca

SEQ ID NO: 14 - protein, 403 aa, Homo sapiens
MDQSEENCISGPVEAKTPVGGPEHVLVTQQFPCQNPLPANSGQAQWVLCPSNSSQRVPLQAQKLVSSHKPVQNQKQKQLQATSVPHPASRPLNNTQNSKQSPLSAPENNPEEELASKQKNEESKKRQWALEDLEIGRPPGKGKFGNVYLAREKQSKFILALRVLFKAQLEKAGVEHQLRREVEIQSHLQHPNIIRLYGYFHDATRVYLILEYTPLETVNTELQKLSKFDEQRTATYITELASALSYCHSKTVIHRDIKPENLLLGSAGELEIANFGWSEHAPSSRRTTLCGTLDYLPPEMIEGRMHDEKVDLWSLGVLCCEFLVGKPPFEANTYQETYKRISRVEFTFPDFVTEGARDLISRLLKHVPSQRPMLREVLEYPWITANSSKPSNCQNKESTSKYS

SEQ ID NO: 15 - DNA, 1500 bp, Homo sapiens
gtatccccaagagaaaatacgcatcaaaaattaggaacttagaaatgatagttgaggtggaggaacttccagcagtggcagctcaagtggccaagacaagatgggtcaaagtcagggtgatggtcatggtcctagacgtggcaagaaggatgaaaaggacaagaaaaataagtacgaacctcttgtaccaactagagtggcggaaaaagaagaaaaaacaaagggacaagatgttgccagtaaactgccactggtgacacttcacactcagtgtcggttaaaattactgaagttagagagaattaaagactaccttctcatggtggaagaattcattagaaatcaggaacaaataaaactattagaagaaaagcaagaggagggaagatcaaaagtggatgatctgagggggaccccaatgtcagtaggaaacttggaagagatcatcgatgacaatcatgccattgtgtctacatctgtgggctcagaacactatgacagcattatttcatttgtagagaaggatctgctggaacctggctgctcgattctgctcagacacaaggtacatgcggtgataggggtgctgatggatgatacgggtcccctggtcacaatgatgaaggtggagaaggccccccaggagacctatgtcaatactggggggttggacaaccaaattcaggaaattaaggaatctatggagcttcctctcccccatcctgaatattatgaagagatgggtacaaagcctcctaaaggggtcattctctgtggtccacctggcacaggtaaaaccttgttagccaaagcagtagcaaaccaaacctcagccactttcttgagagtggttggctctgaacttattcagaagtacctaggtgatgggcccaaactcgtacggcaagtatttcaagttgctgaagaacatgcaccatccatcatgtttactgatgaaattgaagccattgggacaaaaagatatgactccaattctggtggtgagagagaaattcagcaaacaatgttggaattggaactgttgaaccaattgggtggatttgattctagggaagatgtgaaagttatcatggccacaaaacaagtagaaactttggatccagtacttatcagaccaggccgcattgacaagaagatcgagttccacctgcctgatgaaaagactaagaagcacatctttcagattcacacaagcaggatgacactggccaatgatgtaaccctggacgacttgatcatggctaaagatgacttctctggtgctgacatcaaggcaatctgtacagaagctggtctgatggccttaagagaacatagaatgaaagcaacaaatgaagacttcaaaaaatctatagaaagtgttctttataagaaacacgaaggcatccctgaggggctttatctctagtgaaccaccgctgccatcaggaagatggttgggagatttcccaacccctgaaagggatgaggttgggggag

SEQ ID NO: 16 - protein, 442 aa, Homo sapiens [sequence omitted]

SEQ ID NO: 17 - DNA, 834 bp, Homo sapiens
catgtcctcgaccgagagcgccggccgcacggcggacaagtcgccgcgccagcaggtggaccgcctactcgtggggctgcgctggcggcggctggaggagccgctgggcttcatcaaagttctccagtggctctttgctattttcgccttcgggtcctgtggctcctacagcggggagacaggagcaatggttcgctgcaacaacgaagccaaggacgtgagctccatcatcgttgcatttggctatcccttcaggttgcaccggatccaatatgagatgcccctctgcgatgaagagtccagctccaagaccatgcacctcatgggggacttctctgcacccgccgagttcttcgtgacccttggcatcttttccttcttctataccatggctgccctagttatctacctgcgcttccacaacctctacacagagaacaaacgcttcccgctggtggacttctgtgtgactgtctccttcaccttcttctggctggtagctgcagctgcctggggcaagggcctgaccgatgtcaagggggccacacgaccatccagcttgacagcagccatgtcagtgtgccatggagaggaagcagtgtgcagtgccggggccacgccctctatgggcctggccaacatctccgtgctctttggctttatcaacttcttcctgtgggccgggaactgttggtttgtgttcaaggagaccccgtggcatggacagggccagggccaggaccaggaccaggaccaggaccagggccagggtcccagccaggagagtgcagctgagcagggagcagtggagaagcagtaagcagccccccacct

SEQ ID NO: 18 - protein, 272 aa, Homo sapiens
MSSTESAGRTADKSPRQQVDRLLVGLRWRRLEEPLGFIKVLQWLFAIFAFGSCGSYSGETGAMVRCNNEAKDVSSIIVAFGYPFRLHRIQYEMPLCDEESSSKTMHLMGDFSAPAEFFVTLGIFSFFYTMAALVIYLRFHNLYTENKRFPLVDFCVTVSFTFFWLVAAAAWGKGLTDVKGATRPSSLTAAMSVCHGEEAVCSAGATPSMGLANISVLFGFINFFLWAGNCWFVFKETPWHGQGQGQDQDQDQDQGQGPSQESAAEQGAVEKQ

SEQ ID NO: 19 - DNA, 1020 bp, Homo sapiens
cctgaccgggcgggaagtcctgacgcccttcccaggattgggcactgcggcagccccggcacagggcggggcccacctgaagcagtgtgacctgctgaagctgtcccggcggcagaagcagctctgccggagggagcccggcctggctgagaccctgagggatgctgcgcacctcggcctgcttgagtgccagtttcagttccggcatgagcgctggaactgtagcctggagggcaggatgggcctgctcaagagaggcttcaaagagacagctttcctgtacgcggtgtcctctgccgccctcacccacaccctggcccgggcctgcagcgctgggcgcatggagcgctgcacctgtgatgactctccggggctggagagccggcaggcctggcagtggggcgtgtgcggtgacaacctcaagtacagcaccaagtttctgagcaacttcctggggtccaagagaggaaacaaggacctgcgggcacgggcagacgcccacaatacccacgtgggcatcaaggctgtgaagagtggcctcaggaccacgtgtaagtgccatggcgtatcaggctcctgtgccgtgcgcacctgctggaagcagctctccccgttccgtgagacgggccaggtgctgaaactgcgctatgactcggctgtcaaggtgtccagtgccaccaatgaggccttgggccgcctagagctgtgggcccctgccaggcagggcagcctcaccaaaggcctggccccaaggtctggggacctggtgtacatggaggactcacccagcttctgccggcccagcaagtactcacctggcacagcaggtagggtgtgctcccgggaggccagctgcagcagcctgtgctgcgggcggggctatgacacccagagccgcctggtggccttctcctgccactgccaggtgcagtggtgctgctacgtggagtgccagcaatgtgtgcaggaggagcttgtgtacacctgcaagcactaggcctactgcccagcaagccagtc

SEQ ID NO: 20 - protein, 331 aa, Homo sapiens
LTGREVLTPFPGLGTAAAPAQGGAHLKQCDLLKLSRRQKQLCRREPGLAETLRDAAHLGLLECQFQFRHERWNCSLEGRMGLLKRGFKETAFLYAVSSAALTHTLARACSAGRMERCTCDDSPGLESRQAWQWGVCGDNLKYSTKFLSNFLGSKRGNKDLRARADAHNTHVGIKAVKSGLRTTCKCHGVSGSCAVRTCWKQLSPFRETGQVLKLRYDSAVKVSSATNEALGRLELWAPARQGSLTKGLAPRSGDLVYMEDSPSFCRPSKYSPGTAGRVCSREASCSSLCCGRGYDTQSRLVAFSCHCQVQWCCYVECQQCVQEELVYTCKH

SEQ ID NO: 21 - DNA, 1085 bp, Homo sapiens
tagtgagccgagatggcactactatattccagcttgggtgtggttgtgtgcacctgtagtcctagttactttggactgacgggcagcgagcccctgaccatcctcccgctgaccctggagccagaggcggctgcccaggcgcactacaaggcctgcgaccggctgaagctggagcggaagcagcggcgcatgtgccgccgggacccgggcgtggcagagacgctggtggaggccgtgagcatgagtgcgctcgagtgccagttccagttccgctttgagcgctggaactgcacgctggagggccgctaccgggccagcctgctcaagcgaggtttcaaggagactgccttcctctatgccatctcctcggctggcctgacgcacgcactggccaaggcgtgcagcgcgggccgcatggagcgctgtacctgcgatgaggcacccgacctggagaaccgtgagggctggaagtggggtggctgtagcgaggacatcgagtttggtgggatggtgtctcgggagttcgccgacgcccgggagaaccggccagatgcccgctcagccatgaaccgccacaacaacgaggctgggcgccaggtgatcaaggctggggtggagaccacctgcaagtgccacggcgtgtcaggctcatgcacggtgcggacctgctggcggcagttggcgcctttccatgaggtgggcaagcatctgaagcacaagtatgagtcggcactcaaggtgggcagcaccaccaatgaagctgccggcgaggcaggtgccatctccccaccacggggccgtgcctcgggggcaggtggcagcgacccgctgccccgcactccagagctggtgcacctggatgactcgcctagcttctgcctggctggccgcttctccccgggcaccgctggccgtaggtgccaccgtgagaagaactgcgagagcatctgctgtggccgcggccataacacacagagccgggtggtgacaaggccctgccagtgccaggtgcgttggtgctgctatgtggagtgcaggcagtgcacgcagcgtgaggaggtctacacctgcaagggctgagttcc

SEQ ID NO: 22 - protein, 355 aa, Homo sapiens
MALLYSSLGVVVCTCSPSYFGLTGSEPLTILPLTLEPEAAAQAHYKACDRLKLERKQRRMCRRDPGVAETLVEAVSMSALECQFQFRFERWNCTLEGRYRASLLKRGFKETAFLYAISSAGLTHALAKACSAGRMERCTCDEAPDLENREGWKWGGCSEDIEFGGMVSREFADARENRPDARSAMNRHNNEAGRQVIKAGVETTCKCHGVSGSCTVRTCWRQLAPFHEVGKHLKHKYESALKVGSTTNEAAGEAGAISPPRGRASGAGGSDPLPRTPELVHLDDSPSFCLAGRFSPGTAGRRCHREKNCESICCGRGHNTQSRVVTRPCQCQVRWCCYVECRQCTQREEVYTCKG

SEQ ID NO: 23 - DNA, 2037 bp, Homo sapiens
gccgccgccgccaagatggcggacctggaggcggtgctggccgacgtgagctacctgatggccatggagaagagcaaggccacgccggccgcgcgcgccagcaagaagatactgctgcccgagcccagcatccgcagtgtcatgcagaagtacctggaggaccggggcgaggtgacctttgagaagatcttttcccagaagctggggtacctgctcttccgagacttctgcctgaaccacctggaggaggccaggcccttggtggaattctatgaggagatcaagaagtacgagaagctggagacggaggaggagcgtgtggcccgcagccgggagatcttcgactcatacatcatgaaggagctgctggcctgctcgcatcccttctcgaagagtgccactgagcatgtccaaggccacctggggaagaagcaggtgcctccggatctcttccagccatacatcgaagagatttgtcaaaacctccgaggggacgtgttccagaaattcattgagagcgataagttcacacggttttgccagtggaagaatgtggagctcaacatccacctgaccatgaatgacttcagcgtgcatcgcatcattgggcgcgggggctttggcgaggtctatgggtgccggaaggctgacacaggcaagatgtacgccatgaagtgcctggacaaaaagcgcatcaagatgaagcagggggagaccctggccctgaacgagcgcatcatgctctcgctcgtcagcactggggactgcccattcattgtctgcatgtcatacgcgttccacacgccagacaagctcagcttcatcctggacctcatgaacggtggggacctgcactaccacctctcccagcacggggtcttctcagaggctgacatgcgcttctatgcggccgagatcatcctgggcctggagcacatgcacaaccgcttcgtggtctaccgggacctgaagccagccaacatccttctggacgagcatggccacgtgcggatctcggacctgggcctggcctgtgacttctccaagaagaagccccatgccagcgtgggcacccacgggtacatggctccggaggtcctgcagaagggcgtggcctacgacagcagtgccgactggttctctctggggtgcatgctcttcaagttgctgcgggggcacagccccttccggcagcacaagaccaaagacaagcatgagatcgaccgcatgacgctgacgatggccgtggagctgcccgactccttctcccctgaactacgctccctgctggaggggttgctgcagagggatgtcaaccggagattgggctgcctgggccgaggggctcaggaggtgaaagagagcccctttttccgctccctggactggcagatggtcttcttgcagaagtaccctcccccgctgatccccccacgaggggaggtgaacgcggccgacgccttcgacattggctccttcgatgaggaggacacaaaaggaatcaagcaggaggtggcagagactgtcttcgacaccatcaacgctgagacagaccggctggaggctcgcaagaaagccaagaacaagcagctgggccatgaggaagactacgccctgggcaaggactgcatcatgcatggctacatgtccaagatgggcaaccccttcctgacccagtggcagcggcggtacttctacctgttccccaaccgcctcgagtggcggggcgagggcgaggccccgcagagcctgctgaccatggaggagatccagtcggtggaggagacgcagatcaaggagcgcaagtgcctgctcctcaagatccgcggtgggaaacagttcattttgcagtgcgatagcgaccctgagctggtgcagtggaagaaggagctgcgcgacgcctaccgcgaggcccagcagctggtgcagcgggtgcccaagatgaagaacaagccgcgctcgcccgtggtggagctgagcaaggtgccgctggtccagcgcggcagtgccaacggcctctgacccgcccacccgcct

SEQ ID NO: 24 - protein, 668 aa, Homo sapiens
MADLEAVLADVSYLMAMEKSKATPAARASKKILLPEPSIRSVMQKYLEDRGEVTFEKIFSQKLGYLLFRDFCLNHLEEARPLVEFYEEIKKYEKLETEEERVARSREIFDSYIMKELLACSHPFSKSATEHVQGHLGKKQVPPDLFQPYIEEICQNLRGDVFQKFIESDKFTRFCQWKNVELNIHLTMNDFSVHRIIGRGGFGEVYGCRKADTGKMYAMKCLDKKRIKMKQGETLALNERIMLSLVSTGDCPFIVCMSYAFHTPDKLSFILDLMNGGDLHYHLSQHGVFSEADMRFYAAEIILGLEHMHNRFVVYRDLKPANILLDEHGHVRISDLGLACDFSKKKPHASVGTHGYMAPEVLQKGVAYDSSADWFSLGCMLFKLLRGHSPFRQHKTKDKHEIDRMTLTMAVELPDSFSPELRSLLEGLLQRDVNRRLGCLGRGAQEVKESPFFRSLDWQMVFLQKYPPPLIPPRGEVNAADAFDIGSFDEEDTKGIKQEVAETVFDTINAETDRLEARKKAKNKQLGHEEDYALGKDCIMHGYMSKMGNPFLTQWQRRYFYLFPNRLEWRGEGEAPQSLLTMEEIQSVEETQIKERKCLLLKIRGGKQFILQCDSDPELVQWKKELRDAYREAQQLVQRVPKMKNKPRSPVVELSKVPLVQRGSANGL

SEQ ID NO: 25 - DNA, 3003 bp, Homo sapiens
ggtatcatactccagcaagcgcacatcatcagtgacgtcgatcacgatgcatcgtcatggcggcagcgccgttcttgaagcactggcgcaccacttttgagcgggtggagaagttcgtgtccccgatctacttcaccgactgtaacctccgcggcaggctttttggggccagctgccctgtggctgtgctctccagcttcctgacgccggagagacttccctaccaggaggcagtccagcgggacttccgccccgcgcaggtcggcgacagcttcggacccacatggtggacctgctggttccgggtggagctgaccatcccagaggcatgggtgggccaggaagttcacctttgctgggaaagtgatggagaaggtctggtgtggcgtgatggagaacctgtccagggtttaaccaaagagggtgagaagaccagctatgtcctgactgacaggctgggggaaagagacccccgaagcctcactctctatgtggaagtagcctgcaatgggctcctgggggccgggaagggaagcatgattgcagcccctgaccctgagaagatgttccagctgagccgggctgagctagctgtgttccaccgggatgtccacatgctcctggtggatctggagctgctgctgggcatagccaaggcgcagcagctggaatgggtgaagagccgctaccctggcctgtactcccgcatccaggagtttgcgtgccgtgggcagtttgtgcctgtggggggcacctgggtggagatggatgggaacctgcccagtggagaggccatggtgaggcagtttttgcagggccagaacttctttctgcaggagtttgggaagatgtgctctgagttctggctgccggacacctttggctactcagcacagctcccccagatcatgcacggctgtggcatcaggcgctttctcacccagaaattgagctggaatttggtgaactccttcccacaccatacatttttctgggagggcctggatggctcccgtgtactggtccacttcccacctggcgactcctatgggatgcagggcagcgtggaggaggtgctgaagaccgtggccaacaaccgggacaaggggcgggccaaccacagtgccttcctctttggctttggggatgggggtggtggccccacccagaccatgctggaccgcctgaagcgcctgagcaatacggatgggctgcccagggtgcagctatcttctccaagacagctcttctcagcactggagagtgactcagagcagctgtgcacgtgggttggggagctcttcttggagctgcacaatggcacatacaccacccatgcccagatcaagaaggggaaccgggaatgtgagcggatcctgcacgacgtggagctgctcagtagcctggccctggcccgcagtgcccagttcctatacccagcagcccagctgcagcacctctggaggctccttcttctgaaccagttccatgatgtggtgactggaagctgcatccagatggtggcagaggaagccatgtgccattatgaagacatccgttcccatggcaatacactgctcagcgctgcagccgcagccctgtgtgctggggagccaggtcctgagggcctcctcatcgtcaacacactgccctggaagcggatcgaagtgatggccctgcccaaaccgggcggggcccacagcctagccctggtgacagtgcccagcatgggctatgctcctgttcctccccccacctcactgcagcccctgctgccccagcagcctgtgttcgtagtgcaagagactgatggctccgtgactctggacaatggcatcatccgagtgaagctggacccaactggtcgcctgacgtccttggtcctggtggcctctggcagggaggccattgctgagggcgccgtggggaaccagtttgtgctatttgatgatgtccccttgtactgggatgcatgggacgtcatggactaccacctggagacacggaagcctgtgctgggccaggcagggaccctggcagtgggcaccgagggcggcctgcggggcagcgcctggttcttgctacagatcagccccaacagtcggcttagccaggaggttgtgctggacgttggctgcccctatgtccgcttccacaccgaggtacactggcatgaggcccacaagttcctgaaggtggagttccctgctcgcgtgcggagttcccaggccacctatgagatccagtttgggcacctgcagcgacctacccactacaatacctcttgggactgggctcgatttgaggtgtgggcccatcgctggatggatctgtcagaacacggctttgggctggccctgctcaacgactgcaagtatggcgcgtcagtgcgaggcagcatcctcagcctctcgctcttgcgggcgcctaaagccccggacgctactgctgacacggggcgccacgagttcacctatgcactgatgccgcacaagggctctttccaggatgctggcgttatccaagctgcctacagcctaaacttccccctgttggctctgccagcccccagcccagcgcccgccacctcctggagtgcgttttccgtgtcttcacccgcggtcgtattggagaccgtcaagcaggcggagagcagcccccagcgccgctcgctggtcctgaggctgtatgaggcccacggcagccacgtggactgctggctgcacttgtcgctgccggttcaggaggccatcctctgcgatctcttggagcgaccagaccctgctggccacttgacttcgggacaaccgcctgaagctcaccttttctcccttccaagtgctgtccctgttgctcgtgcttcagcctccgccacactgagtccctggggctggggttttgtttgtagaaggctctggggactcctaatttctgcttccccagcctaaagcagggatcagtcttttcttgtggaataaatccttggatcgggaaaaaaaaaaa

SEQ ID NO: 26 - protein, 963 aa, Homo sapiens
MAAAPFLKHWRTTFERVEKFVSPIYFTDCNLRGRLFGASCPVAVLSSFLTPERLPYQEAVQRDFRPAQVGDSFGPTWWTCWFRVELTIPEAWVGQEVHLCWESDGEGLVWRDGEPVQGLTKEGEKTSYVLTDRLGERDPRSLTLYVEVACNGLLGAGKGSMIAAPDPEKMFQLSRAELAVFHRDVHMLLVDLELLLGIAKAQQLEWVKSRYPGLYSRIQEFACRGQFVPVGGTWVEMDGNLPSGEAMVRQFLQGQNFFLQEFGKMCSEFWLPDTFGYSAQLPQIMHGCGIRRFLTQKLSWNLVNSFPHHTFFWEGLDGSRVLVHFPPGDSYGMQGSVEEVLKTVANNRDKGRANHSAFLFGFGDGGGGPTQTMLDRLKRLSNTDGLPRVQLSSPRQLFSALESDSEQLCTWVGELFLELHNGTYTTHAQIKKGNRECERILHDVELLSSLALARSAQFLYPAAQLQHLWRLLLLNQFHDVVTGSCIQMVAEEAMCHYEDIRSHGNTLLSAAAAALCAGEPGPEGLLIVNTLPWKRIEVMALPKPGGAHSLALVTVPSMGYAPVPPPTSLQPLLPQQPVFVVQETDGSVTLDNGIIRVKLDPTGRLTSLVLVASGREAIAEGAVGNQFVLFDDVPLYWDAWDVMDYHLETRKPVLGQAGTLAVGTEGGLRGSAWFLLQISPNSRLSQEVVLDVGCPYVRFHTEVHWHEAHKFLKVEFPARVRSSQATYEIQFGHLQRPTHYNTSWDWARFEVWAHRWMDLSEHGFGLALLNDCKYGASVRGSILSLSLLRAPKAPDATADTGRHEFTYALMPHKGSFQDAGVIQAAYSLNFPLLALPAPSPAPATSWSAFSVSSPAVVLETVKQAESSPQRRSLVLRLYEAHGSHVDCWLHLSLPVQEAILCDLLERPDPAGHLTSGQPPEAHLFSLPSAVPVARASASATLSPWGWGFVCRRLWGLLISASPA

SEQ ID NO: 27 - DNA, 805 bp, Homo sapiens
gagtgaggaagatttgctggccctggcagcgtcgcggctgagccgccgcaagagggtggcgggcgcggccgtcggagtggccatggtgctgctgctgctggtggccatcccgctgctggtgcacagctcccgcgggccagcgcactacgagatgctgggtcgctgccgcatggtgtgcgacccgcatgggccccgtggccctggtccggacggcgcgcctgcttccgtgccccccttcccgccaggcgccaagggagaggtgggccggcgcgggaaagcaggcctgcgggggccccctggaccaccaggtccaagagggcccccaggagaacccggcaggccaggccccccgggccctcccggtccaggtccgggcggggtggcgcccgctgccggctacgtgcctcgcattgctttctacgcgggcctgcggcggccccacgagggttacgaggtgctgcgcttcgacgacgtggtgaccaacgtgggcaacgcctacgaggcagccagcggcaagtttacttgccccatgccaggcgtctacttcttcgcttaccacgtgctcatgcgcggcggcgacggcaccagcatgtgggccgacctcatgaagaacggacaggtccgggccagcgccattgctcaggacgcggaccagaactacgactacgccagcaacagcgtcattctgcacctggacgtgggcgacgaggtcttcatcaagctggacggcgggaaagtgcacggcggcaacaccaacaagtacagcaccttctccggcttcatcatctaccccgactgagccggc

SEQ ID NO: 28 - protein, 238 aa, Homo sapiens
MVLLLLVAIPLLVHSSRGPAHYEMLGRCRMVCDPHGPRGPGPDGAPASVPPFPPGAKGEVGRRGKAGLRGPPGPPGPRGPPGEPGRPGPPGPPGPGPGGVAPAAGYVPRIAFYAGLRRPHEGYEVLRFDDVVTNVGNAYEAASGKFTCPMPGVYFFAYHVLMRGGDGTSMWADLMKNGQVRASAIAQDADQNYDYASNSVILHLDVGDEVFIKLDGGKVHGGNTNKYSTFSGFIIYPD

SEQ ID NO: 29 - DNA, 805 bp, Homo sapiens; identical to SEQ ID NO: 27

SEQ ID NO: 30 - protein, 238 aa, Homo sapiens; identical to SEQ ID NO: 28

SEQ ID NO: 31 - DNA, 5895 bp, Homo sapiens
cagggctgaagctcctggcaccatgatgctcaccccagcaggaccagagcaccgaggcccaaggccccagcctgccatgccgctgccaccgcggagcctgcaggtgctcctgctgctgctgctgttgctgctgctgctgccgggcatgtgggctgaggcaggcttgcccagggcaggcgggggttcacagccccccttccgcaccttctcggccagcgactggggcctcacccacctagtggtgcatgagcagacaggcgaggtgtatgtgggcgcagtgaaccgcatctataagctgtcggggaacctgacactgctgcgggcccacgtcacgggccctgtggaggacaacgagaagtgctacccgccgcccagcgtgcagtcctgcccccacggcctgggcagtactgacaacgtcaacaagctgctgctgctggactatgccgctaaccgcctgctggcctgtggcagcgcctcccagggcatctgccagttcctgcgtctggacgatctcttcaaactgggtgagccacaccaccgtaaggagcactacctgtccagcgtgcaggaggcaggcagcatggcgggcgtgctcattgccgggccaccgggccagggccaggccaagctcttcgtgggcacacccatcgatggcaagtccgagtacttccccacactgtccagccgtcggctcatggccaacgaggaggatgccgacatgttcggcttcgtgtaccaggatgagtttgtgtcatcacagctcaagatcccttcggacacgctgtccaagttcccggcctttgacatctactatgtgtacagcttccgcagcgagcagtttgtctactacctcacgctgcagctagacacacagctgacctcgcctgatgccgccggcgagcacttcttcacgtccaagatcgtgcggctctgtgtggacgaccccaaattctactcgtacgttgagttccccattggctgcgagcaggcgggtgtggagtaccgcctggtgcaggatgcctacctgagccggcccggccgtgccctggcccaccagctgggcctggctgaggacgaggacgtgctgttcactgtgttcgcccagggccagaagaaccgcgtgaagccaccaaaggagtcagcactgtgcctgttcacgctcagggccatcaaggagaagattaaggagcgcatccagtcctgctaccgtggtgagggcaagctctccctgccgtggctgctcaacaaggagctgggctgcatcaactcgcccctgcagatcgatgacgacttctgcgggcaggacttcaaccagcccctggggggcacagtcaccattgaggggacgcccctgttcgtggacaaggatgatggcctgaccgccgtggctgcctatgactatcggggccgcactgtggtattcgccggcacgcgaagtggccgcatccgcaagatcctggtggacctctcaaaccccggtggccggcctgccctggcctacgagagcgtcgtggcccaggagggcagccccatcctgcgagacctcgtcctcagccccaaccaccagtacctctacgccatgaccgagaagcaggtgacgcgggtgcctgtggagagctgtgtgcagtacacgtcctgtgagctgtgtctggggtcacgggacccccactgtggctggtgtgtcctgcacagcatgtgctcgcggcgggacgcctgtgagcgagcagacgagccccagcgctttgctgcggacctgctgcagtgtgtgcagctgactgtgcagccccgcaatgtgtctgtcaccatgtcccaggtcccagtacttgtgctgcaggcctggaacgtgcctgacctctcagctggcgtcaactgctccttcgaggacttcacggaatctgagagcgtcctggaggatggccggatccactgccgctcaccctccgcccgggaggtggcgcccatcacgcggggccagggtgagggagaccagcgggtggtgaaactctacctaaagtccaaggagacagggaagaagtttgcgtctgtggacttcgtcttctacaactgcagcgtccaccagtcgagctgcctgtcctgtgtcaacggctcctttccctgccactggtgcaaataccgccacgtgtgcacacacaacgtggctgactgcgccttcctggagggccgtgtcaacgtgtctgaggactgcccacagatcctgccctccacgcagatctacgtgccagtgggagtggtaaaacccatcaccctggccgcacggaacctgccacagccacagtcaggccagcgtggatatgagtgcctcttccacatcccgggcagcccggcccgtgtcaccgccctgcgcttcaacagctccagcctgcagtgccagaattcctcgtactcctacgaggggaacgatgtcagcgacctgccagtgaacctgtcagtcgtgtggaacggcaactttgtcattgacaacccacagaacatccaggcgcacctctacaagtgcccggccctgcgcgagagctgcggcctctgcctcaaggccgacccgcgcttcgagtgcggatggtgcgtggccgagcgccgctgctccctgcgacaccactgcgctgccgacacacctgcatcgtggatgcacgcgcgtcacggcagcagtcgctgcaccgaccccaagatcctcaagctgtcccccgagacgggcccgaggcagggcggcacgcggctcactatcacaggcgagaacctgggcctgcgattcgaagacgtgcgtctgggcgtgcgcgtgggcaaggtgctgtgcagccctgtggagagcgagtacatcagtgcggagcagatcgtctgtgagatcggggacgccagctccgtgcgtgcccatgacgccctggtggaggtgtgtgtgcgggactgctcaccacactaccgcgccctgtcacccaagcgcttcaccttcgtgacaccaaccttctaccgtgtgagcccctcccgtgggcctctgtcagggggcacctggattggcatcgagggaagccacctgaacgcaggcagtgatgtggctgtgtcggtcggtggccggccctgctccttctcctggtccaggaggaactcccgtgagatccggtgcctgacaccccccgggcagagccctggcagcgctcccatcatcatcaacatcaaccgcgcccagctcaccaaccctgaggtgaagtacaactacaccgaggaccccaccatcctgaggatcgaccccgagtggagcatcaacagcggtgggaccctcctgacggtcacaggcaccaacctggccactgtccgtgaaccccgaatccgggccaagtatggaggcattgagagggagaactgcctggtgtacaatgacaccaccatggtatgccgcgccccgtctgtggccaaccctgtgcgcagcccaccagagctgggggagcggccggatgagctgggcttcgtcatggacaacgtgcgctccctgcttgtgctcaactccacctccttcctctactaccctgaccccgtactggagccactcagccccactggcctgctggagctgaagcccagctccccactcatcctcaagggccggaacctcttgccacctgcacccggcaactcccgactcaactacacggtgctcatcggctccacaccctgtaccctcaccgtgtcggagacgcaactgctgtgcgaggcgcccaacctcactgggcagcacaaggtcacggtgcgtgcaggtggcttcgagttctcgccagggacactgcaggtgtactcggacagcctgctgacgctgcctgccattgtgggcattggcggaggcgggggtctcctgctgctggtcatcgtggctgtgctcatcgcctacaagcgcaagtcacgagatgctgaccgcacactcaagcggctgcagctccagatggacaacctggagtcccgcgtggccctcgaatgcaaggaagcctttgcagagctgcagacagacatccacgagctgaccaatgacctggacggtgccggcatccccttccttgactaccggacatatgccatgcgggtgctctttcctgggatcgaggaccaccctgtgctcaaggagatggaggtacaggccaatgtggagaagtcgctgacactgttcgggcagctgctgaccaagaagcacttcctgctgaccttcatccgcacgctggaggcacagcgcagcttctccatgcgcgaccgcgggaatgtggcctcgctcatcatgacggccctgcagggcgagatggaatacgccacaggcgtgctcaagcagctgctttccgacctcatcgagaagaacctggagagcaagaaccaccccaagctgctactgcgccggccaactgagtcggtggcagagaagatgctaactaactggttcaccttcctcttgtataagttcctcaaggagtgcgctggggagccgctgttcatgctgtactgcgccatcaagcagcagatggagaagggccccattgacgccatcacgggtgaggcacgctactccctgagtgaggacaagctcatccggcagcagattgactacaagacactgaccctgaactgtgtgaaccctgagaatgagaatgcacctgaggtgccggtgaaggggctggactgtgacacggtcacccaggccaaggagaagctgctggacgctgcctacaagggcgtgccctactcccagcggcccaaggccgcggacatggacctggagtggcgccagggccgcatggcgcgcatcatcctgcaggacgaggacgtcaccaccaagattgacaacgattggaagaggctgaacacactggctcactaccaggtgacagacgggtcctcggtggcactggtgcccaagcagacgtccgcctacaacatctccaactcctccaccttcaccaagtccctcagcagatacgagagcatgctgcgcacggccagcagccccgacagcctgcgctcgcgcacgcccatgatcacgcccgacctggagagcggcaccaagctgtggcacctggtgaagaaccacgaccacctggaccagcgtgagggtgaccgcggcagcaagatggtctcggagatctacttgacacggctactggccaccaagcagggcacactgcagaagtttgtggacgacctgtttgagaccatcttcagcacggcacaccggggctcagccctgccgctggccatcaagtacatgttcgacttcctggatgagcaggccgacaagcaccagatccacgatgctgacgtgcgccacacctggaagagcaactgcagcctgcccctgcgcttctgggtgaacgtgatcaagaacccacagtttgtgttcgacattcacaagaacagcatcacggacgcctgcttgtcggtggtggcccagaccttcatggactcctgctccacctctgagcacaagctgggcaaggactcaccctccaacaagctgctctacgccaaggacatccccaactacaagagctgggtggagaggaggtactatgcagacatcgccaagatgccagccatcagcgaccaggacatgagtgcgtatctggctgagcagtcccgcctgcacctgagccagttcaacagcatgagcgccttgcacgagatctactcctacatcaccaagtacaaggatgaggtgcagatcctggcagccctggagaaggatgagcaggcgcggcggcagcggctgcggagcaagctggagcaggtggtggacacgatggccctgagcagctgagccccagctgtgatcatccagcatgatgcagcgtgaggacagctgagcagggaccgggacagccctcaccgcatgcgtgtggagtgtccggtggt

SEQ ID NO: 32 - protein, 1925 aa, Homo sapiens
MMLTPAGPEHRGPRPQPAMPLPPRSLQVLLLLLLLLLLLPGMWAEAGLPRAGGGSQPPFRTFSASDWGLTHLVVHEQTGEVYVGAVNRIYKLSGNLTLLRAHVTGPVEDNEKCYPPPSVQSCPHGLGSTDNVNKLLLLDYAANRLLACGSASQGICQFLRLDDLFKLGEPHHRKEHYLSSVQEAGSMAGVLIAGPPGQGQAKLFVGTPIDGKSEYFPTLSSRRLMANEEDADMFGFVYQDEFVSSQLKIPSDTLSKFPAFDIYYVYSFRSEQFVYYLTLQLDTQLTSPDAAGEHFFTSKIVRLCVDDPKFYSYVEFPIGCEQAGVEYRLVQDAYLSRPGRALAHQLGLAEDEDVLFTVFAQGQKNRVKPPKESALCLFTLRAIKEKIKERIQSCYRGEGKLSLPWLLNKELGCINSPLQIDDDFCGQDFNQPLGGTVTIEGTPLFVDKDDGLTAVAAYDYRGRTVVFAGTRSGRIRKILVDLSNPGGRPALAYESVVAQEGSPILRDLVLSPNHQYLYAMTEKQVTRVPVESCVQYTSCELCLGSRDPHCGWCVLHSMCSRRDACERADEPQRFAADLLQCVQLTVQPRNVSVTMSQVPVLVLQAWNVPDLSAGVNCSFEDFTESESVLEDGRIHCRSPSAREVAPITRGQGEGDQRVVKLYLKSKETGKKFASVDFVFYNCSVHQSSCLSCVNGSFPCHWCKYRHVCTHNVADCAFLEGRVNVSEDCPQILPSTQIYVPVGVVKPITLAARNLPQPQSGQRGYECLFHIPGSPARVTALRFNSSSLQCQNSSYSYEGNDVSDLPVNLSVVWNGNFVIDNPQNIQAHLYKCPALRESCGLCLKADPRFECGWCVAERRCSLRHHCAADTPASWMHARHGSSRCTDPKILKLSPETGPRQGGTRLTITGENLGLRFEDVRLGVRVGKVLCSPVESEYISAEQIVCEIGDASSVRAHDALVEVCVRDCSPHYRALSPKRFTFVTPTFYRVSPSRGPLSGGTWIGIEGSHLNAGSDVAVSVGGRPCSFSWSRRNSREIRCLTPPGQSPGSAPIIININRAQLTNPEVKYNYTEDPTILRIDPEWSINSGGTLLTVTGTNLATVREPRIRAKYGGIERENCLVYNDTTMVCRAPSVANPVRSPPELGERPDELGFVMDNVRSLLVLNSTSFLYYPDPVLEPLSPTGLLELKPSSPLILKGRNLLPPAPGNSRLNYTVLIGSTPCTLTVSETQLLCEAPNLTGQHKVTVRAGGFEFSPGTLQVYSDSLLTLPAIVGIGGGGGLLLLVIVAVLIAYKRKSRDADRTLKRLQLQMDNLESRVALECKEAFAELQTDIHELTNDLDGAGIPFLDYRTYAMRVLFPGIEDHPVLKEMEVQANVEKSLTLFGQLLTKKHFLLTFIRTLEAQRSFSMRDRGNVASLIMTALQGEMEYATGVLKQLLSDLIEKNLESKNHPKLLLRRPTESVAEKMLTNWFTFLLYKFLKECAGEPLFMLYCAIKQQMEKGPIDAITGEARYSLSEDKLIRQQIDYKTLTLNCVNPENENAPEVPVKGLDCDTVTQAKEKLLDAAYKGVPYSQRPKAADMDLEWRQGRMARIILQDEDVTTKIDNDWKRLNTLAHYQVTDGSSVALVPKQTSAYNISNSSTFTKSLSRYESMLRTASSPDSLRSRTPMITPDLESGTKLWHLVKNHDHLDQREGDRGSKMVSEIYLTRLLATKQGTLQKFVDDLFETIFSTAHRGSALPLAIKYMFDFLDEQADKHQIHDADVRHTWKSNCSLPLRFWVNVIKNPQFVFDIHKNSITDACLSVVAQTFMDSCSTSEHKLGKDSPSNKLLYAKDIPNYKSWVERRYYADIAKMPAISDQDMSAYLAEQSRLHLSQFNSMSALHEIYSYITKYKDEVQILAALEKDEQARRQRLRSKLEQVVDTMALSS

SEQ ID NO: 33 - protein, 945 aa, Mus musculus
MRARSGVRSALLLALLLCWDPTPSLAGVDSAGQVLPDSYPSAPAEQLPYFLLEPQDAYIVKNKPVELHCRAFPATQIYFKCNGEWVSQNDHVTQESLDEATGLRVREVQIEVSRQQVEELFGLEDYWCQCVAWSSSGTTKSRRAYIRIAYLRKNFDQEPLAKEVPLDHEVLLQCRPPEGVPVAEVEWLKNEDVIDPAQDTNFLLTIDHNLIIRQARLSDTANYTCVAKNIVAKRRSTAATVIVYVNGGWSSWAEWSPCSNRCGRGWQKRTRTCTNPAPLNGGAFCEGQAFQKTACTTVCPVDGAWTEWSKWSACSTECAHWRSRECMAPPPQNGGRDCSGTLLDSKNCTDGLCVLNQRTLNDPKSHPLETSGDVALYAGLVVAVFVVVAVLMAEGVIVYRRNCRDFDTDITDSSAALTGGFHPVNFKTARPNNPQLLHPSAPPDLTASAGIYRGPVYALQDSADKIPMTNSPLLDPLPSLKIKVYNSSTIGSGSGLADGADLLGVLPPGTYPGDFSRDTHFLHLRSASLGSQHLLGLPRDPSSSVSGTFGCLGGRLSLPGTGVSLLVPNGAIPQGKFYDLYLHINKAESTLPLSEGSQTVLSPSVTCGPTGLLLCRPVVLTVPHCAEVIAGDWIFQLKTQAHQGHWEEVVTLDEETLNTPCYCQLEAKSCHILLDQLGSYVFMGESYSRSAVKRLQLAIFAPALCTSLEYSLRVYCLEDTPVALKEVLELERTLGGYLVEEPKPLLFKDSYHNLRLSLHDIPHAHWRSKLLAKYQEIPFYHVWNGSQRALHCTFTLERHSLASTEFTCKVCVRQVEGEGQIFQLHTTLAETPAGSLDALCSAPGNAITTQLGPYAFKIPLSIRQKICSSLDAPDSRGNDWRLLAQKLSMDRYLNYFATKASPTGVILDLWEARQQDDGDLNSLASALEEMGKSEMLVAMATDGDC

SEQ ID NO: 34 - protein, 945 aa, Homo sapiens
MRARSGARGALLLALLLCWDPTPSLAGIDSGGQALPDSFPSAPAEQLPHFLLEPEDAYIVKNKPVELHCRAFPATQIYFKCNGEWVSQKGHVTQESLDEATGLRIREVQIEVSRQQVEELFGLEDYWCQCVAWSSSGTTKSRRAYIRIAYLRKNFDQEPLAKEVPLDHEVLLQCRPPEGVPVAEVEWLKNEDVIDPAQDTNFLLTIDHNLIIRQARLSDTANYTCVAKNIVAKRRSTTATVIVYVNGGWSSWAEWSPCSNRCGRGWQKRTRTCTNPAPLNGGAFCEGQACQKTACTTVCPVDGAWTEWSKWSACSTECAHWRSRECMAPPPQNGGRDCSGTLLDSKNCTDGLCVLNQRTLNDPKSRPLEPSGDVALYAGLVVAVFVVLAVLMAVGVIVYRRNCRDFDTDITDSSAALTGGFHPVNFKTARPSNPQLLHPSAPPDLTASAGIYRGPVYALQDSADKIPMTNSPLLDPLPSLKIKVYDSSTIGSGAGLADGADLLGVLPPGTYPGDFSRDTHFLHLRSASLGSQHLLGLPRDPSSSVSGTFGCLGGRLTIPGTGVSLLVPNGAIPQGKFYDLYLRINKTESTLPLSEGSQTVLSPSVTCGPTGLLLCRPVVLTVPHCAEVIAGDWIFQLKTQAHQGHWEEVVTLDEETLNTPCYCQLEAKSCHILLDQLGTYVFTGESYSRSAVKRLQLAIFAPALCTSLEYSLRVYCLEDTPAALKEVLELERTLGGYLVEEPKTLLFKDSYHNLRLSLHDIPHAHWRSKLLAKYQEIPFYHVWNGSQKALHCTFTLERHSLASTEFTCKVCVRQVEGEGQIFQLHTTLAETPAGSLDALCSAPGNAATTQLGPYAFKIPLSIRQKICNSLDAPNSRGNDWRLLAQKLSMDRYLNYFATKASPTGVILDLWEARQQDDGDLNSLASALEEMGKSEMLVAMTTDGDC

SEQ ID NO: 35 - protein, 1010 aa, Caenorhabditis elegans
MRKGLRATAARCGLGLGYLLQMLVLPALALLSASGTGSAAQDDEFFHELPETFPSDPPEPLPHFLIEPEEAYIVKNKPVNLYCKASPATQIYFKCNSEWVHQKDHVVDERVDETSGLIVREVSIEISRQQVEELFGPEDYWCQCVAWSSAGTTKSRKAYVRIAYLRKTFEQEPLGKEVSLEQEVLLQCRPPEGIPVAEVEWLKNEDIIDPAEDRNFYITIDHNLIIKQARLSDTANYTCVAKNIVAKRKSTTATVIVYVNGGWSTWTEWSVCNSRCGRGYQKRTRTCTNPAPLNGGAFCEGQSVQKIACTTLCPVDGRWTSWSKWSTCGTECTHWRRRECTAPAPKNGGKDCDGLVLQSKNCTDGLCMQAAPDSDDVALYVGIVIAVTVCLAITVVVALFVYRKNHRDFESDIIDSSALNGGFQPVNIKAARQDLLAVPPDLTSAAAMYRGPVYALHDVSDKIPMTNSPILDPLPNLKIKVYNSSGAVTPQDDLAEFSSKLSPQMTQSLLENEALNLKNQSLARQTDPSCTAFGTFNSLGGHLIIPNSGVSLLIPAGAIPQGRVYEMYVTVHRKENMRPPMEDSQTLLTPVVSCGPPGALLTRPVILTLHHCADPSTEDWKIQLKNQAVQGQWEDVVVVGEENFTTPCYIQLDAEACHILTENLSTYALVGQSTTKAAAKRLKLAIFGPLCCSSLEYSIRVYCLDDTQDALKEVLQLERQMGGQLLEEPKALHFKGSIHNLRLSIHDIAHSLWKSKLLAKYQEIPFYHIWSGSQRNLHCTFTLERLSLNTVELVCKLCVRQVEGEGQIFQLNCTVSEEPTGIDLPLLDPASTITTVTGPSAFSIPLPIRQKLCSSLDAPQTRGHDWRMLAHKLNLDRYLNYFATKSSPTGVILDLWEAQNFPDGNLSMLAAVLEEMGRHETVVSLAAEGQYCSSLDAPQTRGHDWRMLAHKLNLDRYLNYFATKSSPTGVILDLWEAQNFPDGNLSMLAAVLEEMGRHETVVSLAAEGQY

SEQ ID NO: 36 - protein, 931 aa, Homo sapiens [sequence omitted]

SEQ ID NO: 37 - protein, 2302 aa, Rattus rattus
MMDFHFSFLFLLIGTSESQVDVSSSFDGTGYDITLSSVSATTYSSPVSRTLATNVTKPGPPVFLAGERVGSAGILLSWNTPPNPNGRIISYVVKYKEVCPWMQTAYTRARAKPDSLEVLLTNLNPGTTYEIKVAAENNAGIGVFSDPFLFQTAESAPGKVVNLTVEALNYSAVNLIWYLPRQPNGKITSFKISVKHARSGIVVKDVSLRVEDILSGKLPECNENSESFLWSTTSPSPTLGRVTPTVRTTQSSSTAARSKISSVWKEPISFVVTHLRPYTTYLFEVSAVTTEAGYIDSTIVRTPESVPEGPPQNCIMGNVTGKAFSISWDPPTIVTGKFSYRVELYGPSGRILDNSTKDLRFAFTHLTPFTMYDVYVAAETSAGVGPKSNLSVFTPPDVPGAVFDLQIAEVEATEIRITWRKPRQPNGIISQYRVKVSVLETGVVLENTLLTGQDESISNPMSPEIMNLVDPMIGFYEGSGEMSSDLHSPASFIYNSHPHNDFPASTRAEEQSSPVVTTRNQYMTDITAEQLSYVVRRLVPFTEHTISVSAFTIMGEGPPTVLTVRTREQVPSSIQIINYKNISSSSILLYWDPPEYPNGKITHYTIYATELDTNRAFQMTTVDNSFLITGLKKYTRYKMRVAASTHVGESSLSEENDIFVRTPEDEPESSPQDVQVTGVSPSELRLKWSPPEKPNGIIIAYEVLYQNADTLFVKNTSTTDIIISDLKPYTLYNISIRSYTRLGHGNQSSSLLSVRTSETVPDSAPENITYKNISSGEIEISFLPPRSPNGIIQKYTIYLKRSNSHEARTINTTSLTQTIGGLKKYTHYVIEVSASTLKGEGIRSRPISILTEEDAPDSPPQNFSVKQLSGVTVMLSWQPPLEPNGIILYYTVYVWDKSSLRAINATEASLVLSDLDYNVDYGACVTASTRFGDGNARSSIINFRTPEGEPSDPPNDVHYVNLSSSSIILFWTPPVKPNGIIQYYSVYYQNTSGTFVQNFTLLQVTKESDNVTVSARIYRLAIFSYYTFWLTASTSVGNGNKSSDIIHVYTDQDIPEGPVGNLTFESISSTAIHVSWEPPSQPNGLVFYYLSLNLQQSPPRHMIPPLVTYENSIDFDDLEKYTDYIFKITPSTEKGFSETYTTQLHIKTEEDVPDTPPIINTFKNLSSTSILLSWDPPLKPNGAILGYHLTLQGPHANHTFVTSGNHIVLEELSPFTLYSFFAAARTMKGLGPSSILFFYTDESAPLAPPQNLTLINYTSDFVWLTWSPSPLPGGIVKVYSFKIHEHETDTVFYKNISGLQTDAKLEGLEPVSTYSVSVSAFTKVGNGNQYSNVVEFTTQESVPEAVRNIECVARDWQSVSVRWDPPRKTNGIIIHYMITVGGNSTKVSPRDPTYTFTKLLPNTSYVFEVRASTSAGEGNESRCDISTLPETVPSAPTNVAFSNVQSTSATLTWTKPDTIFGYFQNYKITTQLRAQKCREWEPEECIEHQKDQYLYEANQTEETVHGLKKFRWYRFQVAASTNVGYSNASEWISTQTLPGPPDGPPENVHVVATSPFGINISWSEPAVITGPTFYLIDVKSVDDDDFNISFLKSNEENKTTEINNLEVFTRYSVVITAFVGNVSRAYTDGKSSAEVIITTLESVPKDPPNNMTFQKIPDEVTKFQLTFLPPSQPNGNIRVYQALVYREDDPTAVQIHNFSIIQKTDTSIIAMLEGLKGGHTYNISVYAINSAGAGPKVQMRITMDIKAPARPKSKPIPIRDATGKLLVTSTTITIRMPICYYNDDHGPIRNVQVLVAETGAQQDGNVTKWYDAYFNKARPYFTNEGFPNPPCIEGKTKFSGNEEIYVIGADNACMIPGNEEKICNGPLKPKKQYLFKFRATNVMGQFTDSEYSDPIKTLGEGLSERTVEIILSVTLCILSIILLGTAIFAFVRIRQKQKEGGTYSPRDAEIIDTKFKLDQLITVADLELKDERLTRLLSYRKSIKPISKKSFLQHVEELCTNSNLKFQEEFSELPKFLQDLSSTDADLPWNRAKNRFPNIKPYNNNRVKLIADVSLPGSDYINASYVSGYLCPNEFIATQGPLPGTVGDFWRMVWETRTKTLVMLTQCFEKGRIRCHQYWPEDNKPVTVFGDIVITKLMEDIQIDWTIRDLKIERHGDCMTVRQCNFTGWPEHGVPENTTPLIHFVKLVRTSRAHDTTPMVVHCSAGVGRTGVFIALDHLTQHINNHDFVDIYGLVAELRSERMCMVQNLAQYIFLHQCILDLLSNKGGHQPVCFVNYSTLQKMDSLDAMEGDVELEWEETTM

SEQ ID NO: 38 - protein, 2029 aa, Drosophila melanogaster
MGLQMTAARPIAALSLLVLSLLTWTHPTIVDAAHPPEIIRKPQNQGVRVGGVASFYCAARGDPPPSIVWRKNGKKVSGTQSRYTVLEQPGGISILRIEPVRAGRDDAPYECVAENGVGDAVSADATLTIYEGDKTPAGFPVITQGPGTRVIEVGHTVLMTCKAIGNPTPNIYWIKNQTKVDMSNPRYSLKDGFLQIENSREEDQGKYECVAENSMGTEHSKATNLYVKVRRVPPTFSRPPETISEVMLGSNLNLSCIAVGSPMPHVKWMKGSEDLTPENEMPIGRNVLQLINIQESANYTCIAASTLGQIDSVSVVKVQSLPTAPTDVQISEVTATSVRLEWSYKGPEDLQYYVIQYKPKNANQAFSEISGIITMYYVVRALSPYTEYEFYVIAVNNIGRGPPSAPATCTTGETKMESAPRNVQVRTLSSSTMVITWEPPETPNGQVTGYKVYYTTNSNQPEASWNSQMVDNSELTTVSDVTPHAIYTVRVQAYTSMGAGPMSTPVQVKAQQGVPSQPSNFRATDIGETAVTLQWTKPTHSSENIVHYELYWNDTYANQAHHKRISNSEAYTLDGLYPDTLYYIWLAARSQRGEGATTPPIPVRTKQYVPGAPPRNITAIATSSTTISLSWLPPPVERSNGRIIYYKVFFVEVGREDDEATTMTLNMTSIVLDELKRWTEYKIWVLAGTSVGDGPRSHPIILRTQEDVPGDPQDVKATPLNSTSIHVSWKPPLEKDRNGIIRGYHIHAQELRDEGKGFLNEPFKFDVVDTLEFNVTGLQPDTKYSIQVAALTRKGDGDRSAAIVVKTPGGVPVRPTVSLKIMEREPIVSIELEWERPAQTYGELRGYRLRWGVKDQALKEEMLSGPQMTKKRFDNLERGVEYEFRVAGSNHIGIGQETVKIFQTPEGTPGGPPSNITIRFQTPDVLCVTWDPPTREHRNGIITRYDVQFHKKIDHGLGSERNMTLRKAVFTNLEENTEYIFRVRAYTKQGAGPFSDKLIVETERDMGRAPMSLQAEATSEQTAEIWWEPVTSRGKLLGYKIFYTMTAVEDLDDWQTKTVGLTESADLVNLEKFAQYAVAIAARFKNGLGRLSEKVTVRIKPEDVPLNLRAHDVSTHSMTLSWSPPIRLTPVNYKISFDAMKVFVDSQGFSQTQIVPKREIILKHYVKTHTINELSPFTTYNVNVSAIPSDYSYRPPTKITVTTQMAAPQPMVKPDFYGVVNGEEILVILPQASEEYGPISHYYLVVVPEDKSNLHKIPDQFLTDDLLPGRNKPERPNAPYIAAKFPQRSIPFTFHLGSGDDYHNFTNRKLEREKRYRIFVRAVVDTPQKHLYTSSPFSEFLSLDMREAPPGERPHRPDPNWPAEPEVSVNRNKDEPEILWVVLPLMVSTFIVSTALIVLCVVKRRRQPCKTPDQAAVTRPLMAADLGAGPTPSDPVDMRRLNFQTPGMISHPPIPISEFANHIERLKSNDNQKFSQEYESIEPGQQFTWDNSNLEHNKSKNRYANVTAYDHSRVQLPAVEGVVGSDYINANYCDGYRKHNAYVATQGPLQETFVDFWRMCWELKTATIVMMTRLEERTRIKCDQYWPTRGTETYGQIFVTITETQELATYSIRTFQLCRQGFNDRREIKQLQFTAWPDHGVPDHPAPFLQFLRRCRALTPPESGPVIVHCSAGVGRTGCYIVIDSMLERMKHEKIIDIYGHVTCLRAQRNYMVQTEDQYIFIHDAILEAIICGVTEVPARNLHTHLQKLLITEPGETISGMEVEFKKLSNVKMDSSKFVTANLPCNKHKNRLVHILPYESSRVYLTPIHGIEGSDYVNASFIDGYRYRSAYIAAQGPVQDAAEDFWRMLWEHNSTIVVMLTKLKEMGREKCFQYWPHERSVRYQYYVVDPIAEYNMPQYKLREFKVTDARDGSSRTVRQFQFIDWPEQGVPKSGEGFIDFIGQVHKTKEQFGQDGPITVHCSAGVGRSGVFITLSIVLERMQYEGVLDVFQTVRILRSQRPAMVQTEDQYHFCYRAALEYLGSFDNYTN

SEQ ID NO: 39 - protein, 2037 aa, Drosophila melanogaster
MGLQMTAARPIAALSLLVLSLLTWTHPTIVDAAHPPEIIRKPQNQGVRVGGVASFYCAARGDPPPSIVWRKNGKKVSGTQSRYTVLEQPGGISILRIEPVRAGRDDAPYECVAENGVGDAVSADATLTIYEGWQKTATSGDKTPAGFPVITQGPGTRVIEVGHTVLMTCKAIGNPTPNIYWIKNQTKVDMSNPRYSLKDGFLQIENSREEDQGKYECVAENSMGTEHSKATNLYVKVRRVPPTFSRPPETISEVMLGSNLNLSCIAVGSPMPHVKWMKGSEDLTPENEMPIGRNVLQLINIQESANYTCIAASTLGQIDSVSVVKVQSLPTAPTDVQISEVTATSVRLEWSYKGPEDLQYYVIQYKPKNANQAFSEISGIITMYYVVRALSPYTEYEFYVIAVNNIGRGPPSAPATCTTGETEMESAPRNVQVRTLSSSTMVITWEPPETPNGQVTGYKVYYTTNSNQPEASWNSQMVDNSELTTVSELTPHAIYTVRVQAYTSMGAGPMSTPVQVKAQQGVPSQPSNFRATDIGETAVTLQWTKPTHSSENIVHYELYWNDTYANQAHHKRISNSEAYTLDGLYPDTLYYIWLAARSQRGEGATTPPIPVRTKQYVPGAPPRNITAIATSSTTISLSWLPPPVERSNGRIIYYKVFFVEVGREDDEATTMTLNMTSIVLDELKRWTEYKIWVLAGTSVGDGPRSHPIILRTQEDVPGDPQDVKATPLNSTSIHVSWKPPLEKDRNGIIRGYHIHAQELRDEGKGFLNEPFKFDVVDTLEFNVTGLQPDTKYSIQVAALTRKGDGDRSAAIVVKTPGGVPVRPTVSLKIMEREPIVSIELEWERPAQTYGELRGYRLRWGVKDQALKEEMLSGPQMTKKRFDNLERGVEYEFRVAGSNHIGIGQETVKIFQTPEGTPGGPPSNITIRFQTPDVLCVTWDPPTREHRNGIITRYDVQFHKKIDHGLGSERNMTLRKAVFTNLEENTEYIFRVRAYTKQGAGPFSDKLIVETERDMGRAPMSLQAEATSEQTAEIWWEPVTSRGKLLGYKIFYTMTAVEDLDDWQTKTVGLTESADLVNLEKFAQYAVAIAARFKNGLGRLSEKVTVRIKPEDVPLNLRAHDVSTHSMTLSWSPPIRLTPVNYKISFDAMKVFVDSQGFSQTQIVPKREIILKHYVKTHTINELSPFTTYNVNVSAIPSDYSYRPPTKITVTTQMAAPQPMVKPDFYGVVNGEEILVILPQASEEYGPISHYYLVVVPEDKSNLHKIPDQFLTDDLLPGRNKPERPNAPYIAAKFPQRSIPFTFHLGSGDDYHNFTNRKLEREKRYRIFVRAVVDTPQKHLYTSSPFSEFLSLDMREAPPGERPHRPDPNWPAEPEVSVNRNKDEPEILWVVLPLMVSTFIVSTALIVLCVVKRRRQPCKTPDQAAVTRPLMAADLGAGPTPSDPVDMRRLNFQTPGMISHPPIPISEFANHIERLKSNDNQKFSQEYESIEPGQQFTWDNSNLEHNKSKNRYANVTAYDHSRVQLPAVEGVVGSDYINANYCDGYRKHNAYVATQGPLQETFVDFWRMCWELKTATIVMMTRLEERTRIKCDQYWPTRGTETYGQIFVTITETQELATYSIRTFQLCRQGFNDRREIKQLQFTAWPDHGVPDHPAPFLQFLRRCRALTPPESGPVIVHCSAGVGRTGCYIVIDSMLERMKHEKIIDIYGHVTCLRAQRNYMVQTEDQYIFIHDAILEAIICGVTEVPARNLHTHLQKLLITEPGETISGMEVEFKKLSNVKMDSSKFVTANLPCNKHKNRLVHILPYESSRVYLTPIHGIEGSDYVNASFIDGYRYRSAYIAAQGPVQDAAEDFWRMLWEHNSTIVVMLTKLKEMGREKCFQYWPHERSVRYQYYVVDPIAEYNMPQYKLREFKVTDARDGSSRTVRQFQFIDWPEQGVPKSGEGFIDFIGQVHKTKEQFGQDGPITVHCSAGVGRSGVFITLSIVLERMQYEGVLDVFQTVRILRSQRPAMVQTEDQYHFCYRAALEYLGSFDNYTN

SEQ ID NO: 40 - protein, 1767 aa, Drosophila melanogaster
MDCATRKQQQLRAHHQQQQIQIQTHGRKRQQLQKQRHNHHHYYQNSQQQQKHFVWLVVGILTIFLAQHANAADLVINVPNASSNANAFYRIDYSPPFGFPEPNTTIPASDIGKDIKFSRALPGTEYNFWLYYTNSTHREQLTWTVNITTAPDPPANLSVQLRSSKSAFITWRPPGSGRYSGFRIRVLGLTDLPFERSYSLEGNETLQLSAKELTPGGSYQVQAYSVYQGKESVAYTSRNFTTKPNTPGKFIVWFRNETTLLVLWQPPFPAGIYTHYRVSITPDDAIQSVLYVEREGEPPGPAQAAFKGLVPGREYNISVQTVSEDETSSVPTTARYLTVPERVLNVTFDEAYTTSSSFRVRWEPPRTYSEFDAYQVMLSTSRRIFNVPRAANGDSVYFDYPDILEPGRTYEVVVKTIADNVNSWPASGEVTLRPRPVRSLGGFLDDRSNALHISWEPAETGRQDSYRISYHEQTNASEVPAPFPVAAESQITTNLTEYTLDSLLAGRRYLIAVQALSKGVASNASDITRYTRPAAPLIQELRSIDQGLMLSWRSDVNSRQDRYEVHYQRNGTREERTMATNETSLTIHYLHPGSGYEVKVHAISHGVRSEPHSYFQAVFPKPPQNLTLQTVHTNLVVLHWQAPEGSDFSEYVVRYRTDASPWQRISGLHENEARIKDMHYGERYLVQVNTVSFGVESPHPLELNVTMPPQPVSNVVPLVDSRNLTLEWPRPDGHVDFYTLKWWPTDEEDRVEFKNVTQLEDLSSPSVRIPIEDLSPGRQYRFEVQASSNGIRSGTTHLSTRTMPLIQSDVFIANAGHEQGQDETITLSYTPTPADSTRFDIYRFSMGDPTIKDKEKLANDTERKLSFSGLTPGKLYNVTVWTVSGGVASLPVQRLYRLHPLPISDLKAIQVAAREITLHWTAPAGEYTDFELQYLSADEEAPQLLQNVTKNTEITLQGLRPYHNYTFTVVVRSGSIQGTDFADVSVSTLMRSSAPISASYQTLTAPPGKVDYFQPSDVQPGEVTFEWSLEPAEQHGPIDYFRITCQNADDAADVSSYEFPVNATQGKIDGLVPGNHYIFRIQAKSALGYGAEREHIQTMPILAPPVPEPSVTPLEVSRTSSTIEISFRQGYFSNAHGMVRSYTIIIAEDVGKNASGLEMPSWQDVQAYTVWLPYQAIEPYNPFLTSNGSRKSSLEAEHFTIGTANCDKHQAGYCNGPLRAGTTYRIKIRAFTDEDKFTDTVYSSPITTERSDTVIVAATVSAVLLVAMVLVVVYCQHRCQLIRRASKLARMQDELAALPEGYITPNRPVHVKDFSEHYRIMSADSDFRFSEEFEELKHVGRDQACSFANLPCNRPKNRFTNILPYDHSRFKLQPVDDDDGSDYINANYMPGHNSPREFIVTQGPLHSTREEFWRMCWESNSRAIVMLTRCFEKGREKCDQYWPVDRVAMFYGDIKVQLIIDTHYHDWSISEFMVSRNCESRIMRHFHFTTWPDFGVPEPPQSLVRFVRAFRDVIGTDMRPIIVHCSAGVGRSGTFIALDRILQHIHKSDYVDIFGIVFAMRKERVFMVQTEQQYVCIHQCLLAVLEGKEHLLADSLELHANDGYEVTKIYLERQPQTKMGTLPIRASLAMAEKLDADLMTNKDEDEDQEQQQQQQLQLATEVKPKGSNDDEEDEEDDDDDDDDQQPLNNETTATLSSASCSSSTHDVHVVLQEAIEKPKQEQERICAGTQSHADTESDNTDSDDDDEDGDGKVAKDGAVADEDGWWY

SEQ ID NO: 41 - protein, 1767 aa, Drosophila melanogaster
MDCATRKQQQLRAHHQQQQIQIQTHGRKRQQLQKQRHNHHHYYQNPQQQQKHFVWLVVGILTIFLARHANAADLVINVPNASSNANAFYRIDYSPPFGFPEPNTTIPASDIGKDIKFSRALPGTEYNFWLYYTNSTHREQLTWTVNITTAPDPPANLSVQLRSSKSAFITWRPPGSGRYSGFRIRVLGLTDLPFERSYSLEGNETLQLSAKELTPGGSYQVQAYSVYQGKESVAYTSRNFTTKPNTPGKFIVWFRNETTLLVLWQPPFPAGIYTHYRVSITPDDAIQSVLYVEREGEPPGPAQAAFKGLVPGREYNISVQTVSEDETSSVPTTARYLTVPERVLNVTFDEAYTTSSSFRVRWEPPRTYSEFDAYQVMLSTSRRIFNVPRAANGDSVYFDYSDILEPGRTYEVVVKTIADNVNSWPASGEVTLRPRPVRSLGGFLDDRSNALHISWEPAETGRQDSYRISYHEQTNASEVPAPFPVAAESQITTNLTEYTLDSLLAGRRYLIAVQALSKGVASNASDITRYTRPAAPLIQELRSIDQGLMLSWRSDVNSRQDRYEVHYQRNGTREERTMATNETSLTIHYLHPGSGYEVKVHAISHGVRSEPHSYFQAVFPKPPQNLTLQTVHTNLVVLHWQAPEGSDFSEYVVRYRTDASPWQRISGLHENEARIKDMHYGERYLVQVNTVSFGVESPHPLELNVTMPPQPVSNVVPLVDSRNLTLEWPRPDGHVDFYTLKWWPTDEEDRVEFKNVTQLEDLSSPSVRIPIEDLSPGRQYRFEVQASSNGIRSGTTHLSTRTMPLIQSDVFIANAGHEQGQDETITLSYTPTPADSTRFDIYRFSMGDPTIKDKEKLANDTERKLSFSGLTPGKLYNVTVWTVSGGVASLPVQRVYRLHPLPISDLKAIQVAAREITLHWTAPAGEYTDFELQYLSADEEAPQLLQNVTKNTEITLQGLRPYHNYTFTVVVRSGSIQGTDFADVSVSTLMRSSAPISASYQTLTAPPGKVDYFQPSDVQPGEVTFEWSLEPAEQHGPIDYFRITCQNADDAADVSSYEFPVNATQGKIDGLVPGNHYIFRIQAKSALGYGAEREHIQTMPILAPPVPEPSVTPLEVSRTSSTIEISFRQGYFSNAHGMVRSYTIIIAEDVGKIASGLEMPSWQDVQAYTVWLPYQAIEPYNPFLTSNGSRKSSLEAEHLTIGTANCDKHQAGYCNGPLRAGTTYRIKIRAFTDEDKFTDTVYSSPITTERSDTVIVAATVSAVLLVAMVLVVVYCQHRCQLIRRASKLARMQDELAALPEGYITPNRPVHVKDFSEHYRIMSADSDFRFSEEFEELKHVGRDQACSFANLPCNRPKNRFTNILPYDHSRFKLQPVDDDDGSDYINANYMPGHNSPREFIVTQGPFHSTREEFWRMCWESNSRAIVMLTRCFEKGREKCDQYWPVDRVAMFYGDIKVQLIIDTHYHDWSISEFMVSRNCESRIMRHFHFTTWPDFGVPEPPLSLVRFVRAFRDVIGTDMRPIIVHCSAGVGRSGTFIALDRILQHIHKSDYVDIFGIVFAMRKERVFMVQTEQQYVCIHQCLLAVLEGKEHLLADSLELHANDGYEVTKIYLERQPQTKMGTLPIRASLAMAEKLDADLMTNKDEDEDQEQQQQQQLQLATEVKPKGSNDDEEDEEDDDDDDDDQQPLNNETTATLSSASCSSSTHDVHVVLQEAIEKPKQEQERICAGTQSHADTESDNTDSDDDDEDGDGKVAKDGAVADEDGWWY

SEQ ID NO: 42 - protein, 619 aa, Homo sapiens [sequence omitted]

SEQ ID NO: 43 - protein, 2341 aa, Homo sapiens
MGSQTLQILRQGVWAALSGGWYYDPHQATFVNALHLYLWLFLLGLPFTLYMALPSTMIIVAVYCPVIAAVFIVLKMVNYRLHRALDAGEVVDRTANEFTDQRTKAEQGNCSTRRKDSNGPSDPGGGIEMSEFIREATPPVGCSSRNSYAGLDPSNQIGSGSSRLGTAATIKGDTDTAKTSDDISLSLGQSSSLCKEGSEEQDLAADRKLFRLVSNDSFISIQPSLSSCGQDLPRDFSDKVNLPSHNHHHHVDQSLSSACDTEVASLVPLHSHSYRKDHRPRGVPRTSSSAVAFPDTSLNDFPLYQQRRGLDPVSELESSKPLSGSKESLVENSGLSGEFQLAGDLKINTSQPPTKSGKSKPLKAEKSMDSLRSLSTRSSGSTESYCSGTDRDTNSTVSSYKSEQTSSTHIESILSEHEESPKAGTKSGRKKECCAGPEEKNSCASDKRTSSEKIAMEASTNSGVHEAKDPTPSDEMHNQRGLSTSASEEANKNPHANEFTSQGDRPPGNTAENKEEKSDKSAVSVDSKVRKDVGGKQKEGDVRPKSSSVIHRTASAHKSGRRRTGKKRASSFDSSRHRDYVCFRGVSGTKPHSAIFCHDEDSSDQSDLSRASSVQSAHQFSSDSSSSTTSHSCQSPEGRYSALKTKHTHKERGTDSEHTHKAHLVPEGTSKKRATRRTSSTNSAKTRARVLSLDSGTVACLNDSNRLMAPESIKPLTTSKSDLEAKEGEVLDELSLLGRASQLETVTRSRNSLPNQVAFPEGEEQDAVSGAAQASEEAVSFRRERSTFRRQAVRRRHNAGSNPTPPTLLIGSPLSLQDGQQGQQSTAQVKVQSRPPSQAAVLSASASLLVRNGSVHLEASHDNASAVGGSSLHDELGKFSSTLYETGGCDMSLVNFEPAARRASNICDTDSHVSSSTSVRFYPHDVLSLPQIRLNRLLTIDTDLLEQQDIDLSPDLAATYGPTEEAAQKVKHYYRFWILPQLWIGINFDRLTLLALFDRNREILENVLAVILAILVAFLGSILLIQGFFRDIWVFQFCLVIASCQYSLLKSVQPDSSSPRHGHNRIIAYSRPVYFCICCGLIWLLDYGSRNLTATKFKLYGITFTNPLVFISARDLVIVFTLCFPIVFFIGLLPQVNTFVMYLCEQLDIHIFGGNATTSLLAALYSFICSIVAVALLYGLCYGALKDSWDGQHIPVLFSIFCGLLVAVSYHLSRQSSDPSVLFSLVQSKIFPKTEEKNPEDPLSEVKDPLPEKLRNSVSERLQSDLVVCIVIGVLYFAIHVSTVFTVLQPALKYVLYTLVGFVGFVTHYVLPQVRKQLPWHCFSHPLLKTLEYNQYEVRNAATMMWFEKLHVWLLFVEKNIIYPLIVLNELSSSAETIASPKKLNTELGALMITVAGLKLLRSSFSSPTYQYVTVIFTVLFFKFDYEAFSETMLLDLFFMSILFNKLWELLYKLQFVYTYIAPWQITWGSAFHAFAQPFAVPHSAMLFIQAAVSAFFSTPLNPFLGSAIFITSYVRPVKFWERDYNTKRVDHSNTRLASQLDRNPGSDDNNLNSIFYEHLTRSLQHSLCGDLLLGRWGNYSTGDCFILASDYLNALVHLIEIGNGLVTFQLRGLEFRGTYCQQREVEAITEGVEEDEGFCCCEPGHIPHMLSFNAAFSQRWLAWEVIVTKYILEGYSITDNSAASMLQVFDLRKVLTTYYVKGIIYYVTTSSKLEEWLANETMQEGLRLCADRNYVDVDPTFNPNIDEDYDHRLAGISRESFCVIYLNWIEYCSSRRAKPVDVDKDSSLVTLCYGLCVLGRRALGTASHHMSSNLESFLYGLHALFKGDFRISSIRDEWIFADMELLRKVVVPGIRMSIKLHQDHFTSPDEYDDPTVLYEAIVSHEKNLVIAHEGDPAWRSAVLANSPSLLALRHVMDDGTNEYKIIMLNRRYLSFRVIKVNKECVRGLWAGQQQELVFLRNRNPERGSIQNAKQALRNMINSSCDQPIGYPIFVSPLTTSYSDSHEQLKDILGGPISLGNIRNFIVSTWHRLRKGCGAGCNSGGNIEDSDTGGGTSCTGNNATTANNPHSNVTQGSIGNPGQGSGTGLHPPVTSYPPTLGTSHSSHSVQSGLVRQSPARASVASQSSYCYSSRHSSLRMSTTGFVPCRRSSTSQISLRNLPSSIQSRLSMVNQMEPSGQSGLACVQHGLPSSSSSSQSIPACKHHTLVGFLATEGGQSSATDAQPGNTLSPANNSHSKKAEVIYRVQIVDPSQILEGINLSKRKELQWPDEGIRLKAGRNSWKDWSPQEGMEGHVIHRWVPCSRDPGTRSHIDKAVLLVQIDDKYVTVIETGVLELGAEV

SEQ ID NO: 44 - protein, 1446 aa, Mus musculus
MSLVNFEPAARRASNICDTDSHVSSSTSVRFYPHDMIRLNRLLTIDTDLLEQQDIDLSPDLAATYGPTEEAAQKVKHYYRFWVLPQLWIGINFDRLTLLALFDRNREILENILAVVLAILVAFLGSILLIQGFFRDIWVFQFCLVIASCQYSLLKSVQPDSSSPRHGHNRIIAYSRPVYFCLCCGLIWLLDYGSRNLTTSKFKLYGVTFTNPLVLLSARDLVIVFTLCFPIVFFIGLLPQVNTFVMYLCEQLDIHIFGGNATTSLLAALYSFLCSIVAVALLYGLCYGALRDSWDGQHVPVLFSVFCGLLVAVSYHLSRQSNDPSVLFSLMQSKIFPKADEKNPEDPLSEVKDPLPEKLSNSVSERLQSDLVVCVIIGVLYFAIHVSTVFTALQPALKYVLYALVGVVGLVTHYVLPQVRKQLPWHCFSRPLLRTAEHSQYEVRNAATMMWFEKLHVWLLFVEKNIIYPLIVLNELSSSAETIASPKKLDTELGALMITIAGLKLLRSSFSSPTYQYITVIFTVLFFKFDYEAFSETMLLDLFFMSILFSKLWELLYKRQFVYTYVAPWQITWGSAFHAFAQPFAVPHSAMLFVQAIVSAFFSTPLNPFLGSAIFITSYVRPVKFWERDYNTKRVDHSNTRLASQLDRNPGSDDNNLNSIFYEHLTRSLQHSLCGDLLLGRWGNYSTGDCFILASDYLNALVHLIEIGNGLVTFQLRGLEFRGTYCQQREVEAITEGVEEDEGFCCCEPGHVPHVLSFNAAFGQRWLAWEVVVTKYILEGYSITDNSAASMLQVFDLRRVLTTYYVKGIIYYVTTSSKLEEWLANETMQEGLRLCADRNYVDVDPTFNPNIDEDYDHRLAGISRESFCVIYLSWIEYCSSRRAKPLDVDKDSSLVTLCYGLCVLGRRALGTASHHMSSNLESFLYGLHALFKGDFRISSVRDEWIFADMELLRKVVVPGIRMSIKLHQDHFTSPDEYDDPTVLYEAIVSHEKNLVIAHEGDPAWRSAVLANSPSLLALRHVMDDGTNEYKIIMLNRRYLSFRVIKVNKECVRGLWAGQQQELVFLRNRNPERGSIQNAKQALRNMINSSCDQPIGYPIFVSPLTTSYSDSHDQLKEILGGPISLGNIRNFIVSTWHRLRKGCGAGCNSGGNIEDSDTGGGTSCPGNSAVTASDPHNNVSQGSTGHPGQGAGSGLHPPTTSYPPTLGTSHSAHSVQSSLVRQSPARASMASQSSYCYSSRHSSLRMSTTGFVPCRRSSTSQISLRNLPSSIQSRLSMVNQMEAASQGGMGCVQHGLPSSSSSSQSIPACKHHTLVAFLGAEGGQGSATEAQPGNTSSPANISHARKGEVIYRVQIVDLSQILEGINVSKRKELHWPDEGIRLKAGRNSWKDWSPQEGMEGHVVHRWVPCSRDPSTRSHIDNTVLLVQIDDKYVTIIETGVLELGAEV

SEQ ID NO: 45 - protein, 1703 aa, Takifugu rubripes
MGSQTLQILRQGVWASVTGGWYYDPDQNTFVNALHLYIWLFLLCFPFTLYMALQPSMVIVGIYCGVIAAMFLLLKTVNYRLHHALDEGEVVEHQTRESKGSRGGTGGANDPVTRREDSNGLGDPGGGIEMADFIRQETPPVDCSSRNSYVGMDLNQRMSSTHGRTTVAKAPGSEETVIFRRERSTFRRQAVRRRHNAGSNPTPPTSLIGSPLRYALHEADRPSGVRSWYRTVKSQPSRTPSQVTVLSTSASLLARNGSTHLEGSQDKASTVGTTSLQDEFGTLTPSLYEIRGCHIGLGNFESATRRASNNIWDTDSHLSSSTSVRFYPHDLISLHHIRANRLLTMDPELLEQQDDLSPDLQDAPLGQDNPSAASAAGKTRQYYRLWLLPFLWVGLHFDRLTLLALFDRNREVLENVLAVVLAVLVAFLGSVLLIHGFFADIWVFQFCLVIASCQYSLLKSVQPDSSSPRHGHNRIIAYSRPVYFCLCCGLIWLLHYGSLRTTSSRFTLYGVALTSSLVLASARDLVIVFTLCFPIIFFVGLLPQVNTFVMYLFEQLDIHVFGGNASTSLLSALYSILRSIVTVALLYCFCYGALKENWEPHHIPVLFSVFCGLLVAVSYHLSRQSSDPSVLMYVPLSKVFPQLRSKNPEDPLSEVQDPLPEKLRASVNERLQSDLIVCVVIAVLYFAIHVSTVFIALQPYLSYVLYGLLGAVGLLTHYLLPQLRKQLPWYCFSHPLLKTKEYYQFEVRDAAHVMWFEKFHVWLLFVEKNVLYPLVILNELSGSARELASPKRLDTEVGALMITVAGLKLLRSSYSSPTYQYITILFTVLFFTLDHRHLSETLLLDLFLMSIIFSKMWELFYKLHFVYTYIAPWQITWGSAFHAFAQPFAVPHSAMLFVQAVVSSIFSTPLNPFLGSAIFITSYVRPVKFWERDYNTKRVDHSNTRLASQLDRNPGSDDNNLNSIFYEHLTRSLQHSLCGDLLLGRWGNFSTGDCFILASDYLNALVHLIEIGNGLVTFQLRGLEFRGTYCQQREVEAITEGVEEDEGCCCCEPGHLPHILSFNAAFGQRWLAWEVVVTKYVLEGYSITDNSAASMLQVFELRRILTTYYVKGIIYYVIASPKLEEWLANDTMKEGLRGCSERNYVDLDATFNPNIDEDYDHRLSGISRDSFCGVYLGWIQYCNSRRTKPLDSEKDSALVLLCFGLCVLGRRALGTAAHQMSSNLESFLYGLHALFKGDFRISSVRDEWIFADMELLRKVVVPGIRMSLKLHQDHFTSPDEYDEPAVLFEAISTHQQNLVIAHEGDPAWRSAVLSNAPSLLALRHVLDEGTNEYKIIMLNRRYLSFRVIKVNKECVRGLWAGQQQELVFLRNRNPERGSIQNAKQALRNMINSSCDQPIGYPIYVSPLTTSYCNSHPQLRHILGGPISFGNIRNFVVSTWHRLRKGCGAGCNSGGNIEDSDAGGLSCGTSQSSQSVQSGLVRHSPARASVVSQSSSYRYSSSRHSSLRTSTTGLEPCRRSSTSQLSLRTLPTSLQLRLGSTSDPAGPSSSLSSHSIPPCKRHTLVGLLGNDGLCSTVTDPLSQHHHPHHHPQQHNPTHATVRRDDISYRVQIVDVGQVLENINLSKRKELQWPDDAMRHKAGRTCWRDWSPLEGMEGHVIHRWVPCSRDPGSRSHIDKTILLVQVEDKIVPIIETGVIELGAEV

SEQ ID NO: 46 - protein, 552 aa, Drosophila melanogaster
MSTEESSPDSEYTSAVPVDCRVTDLKENEMKQVDFDEDTRVLLVKQNDRLLAVGAKCTHYGAPLQTGALGLGRVRCPWHGACFNLENGDIEDFPGLDSLPCYRVEVGNEGQVMLRAKRSDLVNNKRLKNMVRRKPDDQRVFIVVGGGPSGAVAVETIRQEGFTGRLIFVCREDYLPYDRVKISKAMNLEIEQLRFRDEEFYKEYDIELWQGVAAEKLDTAQKELHCSNGYVVKYDKIYLATGCSAFRPPIPGVNLENVRTVRELADTKAILASITPESRVVCLGSSFIALEAAAGLVSKVQSVTVVGRENVPLKAAFGAEIGQRVLQLFEDNKVVMRMESGIAEIVGNEDGKVSEVVLVDDTRLPCDLLILGTGSKLNTQFLAKSGVKVNRNGSVDVTDFLESNVPDVYVGGDIANAHIHGLAHDRVNIGHYQLAQYHGRVAAINMCGGVKKLEAVPFFFTLIFGKGIRYAGHGSYKDVIIDGSMEDFKFVAYFINEADTVTAVASCGRDPIVAQFAELISQGKCLGRGQIEDPATREDWTKKLGQPLPQVR

SEQ ID NO: 47 - protein, 403 aa, Homo sapiens [sequence omitted]

SEQ ID NO: 48 - protein, 403 aa, Homo sapiens
MDRSKENCISGPVKATAPVGGPKRVLVTQQFPCQNPLPVNSGQAQRVLCPSNSSQRIPLQAQKLVSSHKPVQNQKQKQLQATSVPHPVSRPLNNTQKSKQPLPSAPENNPEEELASKQKNEESKKRQWALEDFEIGRPLGKGKFGNVYLAREKQSKFILALKVLFKAQLEKAGVEHQLRREVEIQSHLRHPNILRLYGYFHDATRVYLILEYAPLGTVYRELQKLSKFDEQRTATYITELANALSYCHSKRVIHRDIKPENLLLGSAGELKIADFGWSVHAPSSRRTTLCGTLDYLPPEMIEGRMHDEKVDLWSLGVLCYEFLVGKPPFEANTYQETYKRISRVEFTFPDFVTEGARDLISRLLKHNPSQRPMLREVLEHPWITANSSKPSNCQNKESASKQS

SEQ ID NO: 49 - protein, 403 aa, Homo sapiens
MDRSKENCISGPVKATAPVGGPKRVLVTQQIPCQNPLPVNSGQAQRVLCPSNSSQRVPLQAQKLVSSHKPVQNQKQKQLQATSVPHPVSRPLNNTQKSKQPLPSAPENNPEEELASKQKNEESKKRQWALEDFEIGRPLGKGKFGNVYLAREKQSKFILALKVLFKAQLEKAGVEHQLRREVEIQSHLRHPNILRLYGYFHDATRVYLILEYAPLGTVYRELQKLSKFDEQRTATYITELANALSYCHSKRVIHRDIKPENLLLGSAGELKIADFGWSVHAPSSRRTTLCGTLDYLPPEMIEGRMHDEKVDLWSLGVLCYEFLVGKPPFEANTYQETYKRISRVEFTFPDFVTEGARDLISRLLKHNPSQRPMLREVLEHPWITANSSKPSNCQNKESASKQS

SEQ ID NO: 50 - protein, 403 aa, Homo sapiens
MDRSKENCISGPVKATAPVGGPKRVLVTQQFPCQNPLPVNSGQAQRVLCPSNSSQRIPLQAQKLVSSHKPVQNQKQKQLQQTSVPHPVSRPLNNTQKSKQPLPSAPENNPEEELASKQKNEESKKRQWALEDFEIGRPLGKGKFGNVYLAREKQSKGILALKVLFKAQLEKAGVEHQLRREVEIQSHLRHPNILRLYGYFHDATRVYLILEYAPLGTVYRELQKLSKFDEQRTATYITELANALSYCHSKRVIHRDIKPENLLLGSAGELKIADFGWSVHAPSSRRTTLCGTLDYLPPEMIEGRMHDEKVDLWSLGVLCYEFLVGKPPFEANTYQETYKRISRVEFTFPDFVTEGARDLISRLLKHNPSQRPMLREVLEHPWITANSSKPSNCQNKESASKQS

SEQ ID NO: 51 - protein, 402 aa, Homo sapiens
MDRSKENCISGPVKATAPVGGPKRVLVTQQFPCQNPLPVNSGQAQRVLCPSNSSQRVPLQAQKLVSSHKPVQNQKQKQLQATSVPHPVSRPLNNTQKSKQPLPSHLKIILRRNWHQNRKMKNQKEAVALEDFEIGRPLGKGKFGNVYLAREKQSKFILALKVLFKAQLEKAGVEHQLRREVEIQSHLRHPNILRLYGYFHDATRVYLILEYAPLGTVYRELQKLSKFDEQRTANLYNRIANALSYCHSKRVIHRDIKPENLLLGSAGELKIADFGWSVHAPSSRRTTLCGTLDYLPPEMIEGRMHDEKVDLWSLGVLCYEFLVGKPPFEANTYQETYKRISRVEFTFPDFVTEGARDLISRLLKHNPSQRPMLREVLEHPWITANSSKPSNCQNKESASKQS

SEQ ID NO: 52 - protein, 440 aa, Homo sapiens [sequence omitted]

SEQ ID NO: 53 - protein, 440 aa, Mus musculus
MGQSQSGGHGPGGGKKDDKDKKKKYEPPVPTRVGKKKKKTKGPDAASKLPLVTPHTQCRLKLLKLERIKDYLLMEEEFIRNQEQMKPLEEKQEEERSKVDDLRGTPMSVGTLEEIIDDNHAIVSTSVGSEHYVSILSFVDKDLLEPGCSVLLNHKVHAVIGVLMDDTDPLVTVMKVEKAPQETYADIGGLDNQIQEIKESVELPLTHPEYYEEMGIKPPKGVILYGPPGTGKTLLAKAVANQTSATFLRVVGSELIQKYLGDGPKLVRELFRVAEEHAPSIVFIDEIDAIGTKRYDSNSGGEREIQRTMLELLNQLDGFDSRGDVKVIMATNRIETLDPALIRPGRIDRKIEFPLPDEKTKKRIFQIHTSRMTLADDVTLDDLIMAKDDLSGADIKAICTEAGLMALRERRMKVTNEDFKKSKENVLYKKQEGTPEGLYL

SEQ ID NO: 54 - protein, 440 aa, Homo sapiens
MGQSQSGGHGPGGGKKDDEDKKKKYEPPVPTRVGKKKKKRKGPDAASKLPLVTPHTQCRLKLLKLERIKDYLLMEEEFIRNQEQMKPLEEKQEEERSKVDDLRGTPMSVGTLEEIIDDNHAIVSTSVGSEHYVSILSFVDKDLLEPGCSVLLNHKVHAVIGVLMDDTDPLVTVMKVEKAPQETYADIGGLDNQIQEIKESVELPLTHPEYYEEMGIKPPKGVILYGPPGTGKTLLAKAVANQTSATFLRVVGSELIQKYLGDGPKLVRELFRVAEEHAPSIVFIDEIDAIGTKRYDSNSGGEREIQRTMLELLNQLDGFDSRGDVKVIMATNRIETLDPALIRPGRIDRKIEFPLPDEKTKKRIFQIHTSRMTLADDVTLDDLIMAKDDLSGADIKAICTEAGLMALRERRMKVTNEDFKKSKENVLYKKQEGTPEGLYL

SEQ ID NO: 55 - protein, 440 aa, Homo sapiens
MGQSQSGGHGPGGGKKDDKDKKKKYEPPVPTRVGKKKKKTKGPDAASKLPLVTPHTQCRLKLLKLERIKDYLLMEEEFIRNQEQMKPLEEKQEEERSKVDDLRGTPMSVGTLEEIIDDNRAIVSTSVGSEHYVSILSFVDKDLLEPGCSVLLNHKVHAVIGVLMDDTDPLVTVMKVEKAPQETYADIGGLDNQIQEIKESVELPLTHPEYYEEMGIKPPKGVILYGPPGTGKTLLAKAVANQTSATFLRVVGSELIQKYLGDGPKLVRELFRVAEEHAPSIVFIDEIDAIGTKRYDSNSGGEREIQRTMLELLNQLDGFDSRGDVKVIMATNRIETLDPALIRPGRIDRKIEFPLPDEKTKKRIFQIHTSRMTLADDVTLDDLIMAKDDLSGADIKAICTEAGLMALRERRMKVTNEDFKKSKENVLYKKQEGTPEGLYL

SEQ ID NO: 56 - protein, 440 aa, Chicken anemia virus
MGQSQSGGHGPGGGKKDDKDKKKKYEPPVPTRVGKKKKKTKGPDAASKPPLVTPHTQCRLKLLKLERIKDYLLMEEEFIRNQEQMKPLEEKQEEERSKVDDLRGTPMSVGTLEEIIDDNHAIVSTSVGSEHYVSILSFVDKDLLEPGCSVLLNHKVHAVIGVLMDDTDPLVTVMKLEKAPQETYADIGGLDNQIQEIKESVELPLTHPEYYEEMGIKPPKGVILYGPPGTGKTLLAKAVANQTSATFLRVVGSELIQKYLGDGPKLVRELFRVAEEHGPSIVFIDEIDAIGTKRYDSNSGGEREIQRTMLELLNQLDGFDSRGDVKVIMATNRIETLDPALIRPGRIDRKIEFPLPDEKTKKRIFQIHTSRMTLADDVTLDELIMAKDDLSGADIKAICTEAGLMALRERRMKVTNEDFKKSKENFLYKKTEGTPEGLYL

SEQ ID NO: 57 - protein, 264 aa, Orycctolagus cuniculus
MSSTESPSRAADKSPRQQVDRLLEGLRWRRLEEPLGFIKVLQWLFAIFAFGSCGSYSGETGAMVRCNNEAKDVSSIIVLFGYPFRLHRIEYEMPLCDDDSSSKTMHLMGDFSAPAEFFVTLGIFSFFYTMAALVVYLRFHKLYTENKRFPLVDFCVTVSFTFFWLVAAAAWGKGLTDVKGATRPSSLTAAMSVCHGEEAVCSAGATPSMGLANISVLFGFINFFLWAGNCWFVFKETPWHGQGQDQGQGPSQESAAEQGAVEKQ

SEQ ID NO: 58 - protein, 264 aa, Mus musculus
MSSTESPGRTSDKSPRQQVDRLLLGLRWQRLEEPLGFIKVLQWLFAIFAFGSCGSYSGETGALVLCNNEAKDVSSIIVLFGYPFRLYQVQYEMPLCDQDSTSKTMNLMGDFSAPAEFFVTLGIFSFFYTMAALVIYLRFHKLYTENKRFPLVDFCVTVSFTFFWLVAAAAWGKGLTDVKGATRPSSLTAAMSVCHGEEAVCSAGATPSMGLANLSVLFGFINFFLWAGNCWFVFKETPWHGQGQDQGQGPSQESAAEQGAVEKQ

SEQ ID NO: 59 - protein, 285 aa, Mus musculus
MDPVSQVASAGTFRALKEPLAFLRALELLFAMFAFATCGGYSGGLRLSVDCVNKTESNLSIDIAFAYPFRLQQVTFEVPTCEGKEQQKLALVGDSSSSAEFFVTVAVFAFLYSLAATVVYIFFQNKYRENNRGPLIDFIVTVVFSFLWLVGSSAWAKGLSDVKVATDPKEVLLLMSACKQPSNKCMAVHSPVMSSLNTSVVFGFLNFILWAGNIWFVFKETGWHSSGQRYLSDPMEKHSSSYNQGRYNQESYGSSGGYSQQANLGPTSDEFGQQPSGPTSFNNQI

SEQ ID NO: 60 - protein, 307 aa, Bovichtus variegatus
MDVVNQLVAGGQFRVVKEPLGFVKVLQWVFAIFAFATCGSYSGELQLSVDCANKTKSDLNIEVEFEYPFRLHEVYFEAPTCQGDPKKIFLVGNYSSSAEFFVTVAVFAFLYSMGALATYIFLQNKYRENNKGPMLDFLATAVFAFMWLVSSSAWAKGLSDVKMATDPENIIKGMHVCHQPGNTCKELRDPVTSGLNTSVVFGFLNLVLWVGNLWFVFKETGWAAPFLRAPPGAPEKQPAPGDAYGQAGYGQGPGGYGPQDSYGPQGGYQPDYGQPASSGGGGYGPQGDYGQQGYGPQGAPTSFSNQM

SEQ ID NO: 61 - protein, 268 aa, Chicken anemia virus
MCMVIFAPLFAIFAFATCGGYSGGLRLSVDCANKSESDLNIDIAFAYPFRLHQVNFDAPTCEGKRRETLSLIGDFSSSAEFFVTIAVFAFLYSLAATVVYIFFQNKYRENNRGPLIDFIVTVVFSFLWLVGSSAWAKGLSDVKIATDPDEVLLLMSACKQQSNKCLPVRSPVMSSLNTSVVFGFLNFILWAGNIWFVFKETGWHSSGQRHAADTMEKQSSGYNQGGYNQDSYGPAGGYNQPGSYGQVGDYGQPQSYGQSGPTSFANQI

SEQ ID NO: 62 - protein, 357 aa, Homo sapiens [sequence omitted]

SEQ ID NO: 63 - protein, 354 aa, Chicken anemia virus
MALLRALLGLLACTPRPSAAYFGLTGNEALTILPLTSEMEEAAVKAHYKVCDRLKLEKKQRRMCRRDPGGAETLMEAISMSALECQYQFRFERWNCTLEGRYRASLLKRGFKETAFLYAISSAGLTHAMAKACSAGRMERCTCDEAPDLENREAWQWGGCGDNLKYSNKFVKEFLGRKPNKDLRARVDFHNNLVGMKVIKAGVETTCKCHGVSGSCTVRTCWRQLSPFHEIGKQLKQKYETSLKVGSTTNEATGEGDISPPKKSIPGHSDQIPRTTDLVYIDDSPSFCLMSRYSPGTSGRKCYKDKNCDSICCGRGHNTQSRVVTRPCQCQVRWCCYVECKQCTQREEVYTCKD

SEQ ID NO: 64 - protein, 365 aa, Homo sapiens
MLDGSPLARWLAAAFGLTLLLAALRPSAAYFGLTGSEPLTILPLTLEPEAAAQAHYKACDRLKLERKQRRMCRRDPGVAETLVEAVSMSALECQFQFRFERWNCTLEGRYRASLLKRGFKETAFLYAISSAGLTHALAKACSAGRMERCTCDEAPDLENREAWQWGGCGDNLKYSSKFVKEFLGRRSSKDLRARVDFHNNLVGVKVIKAGVETTCKCHGVSGSCTVRTCWRQLAPFHEVGKHLKHKYETALKVGSTTNEAAGEAGAISPPRGRASGAGGSDPLPRTPELVHLDDSPSFCLAGRFSPGTAGRRCHREKNCESICCGRGHNTQSRVVTRPCQCQVRWCCYVECRQCTQREEVYTCKG

SEQ ID NO: 65 - protein, 371 aa, Xenopus laevis
MRILTFLLGLKTLWVLAFSSLSNTIAVNNSGKWWGIVNVASAGNVLPGSDARPVPLVLDPSLQLLSRQKRLIRQNPGILQSITRGLHSAIRECKWHFRNRRWNCPTGTGNQVFGKIINRGCRETAFVFAITSAGVTHSVARSCSEGSIESCSCDYRRRGPGGPDWHWGGCSDNIEFGRFIGREFVDSSERGRDLKYLVNLHNNQAGRLTVLTEMRQECKCHGMSGSCSLRTCWMRLPPFRSVGDALKDRFDGASKVTYSNNGSNRWGSRSDPPHLEPENPTHALPSSQDLVYFEKSPNFCSPSEKNGTPGTTGRICNSTSLGLDGCELLCCGRGYRSLAEKVTERCHCTFNWCCHVTCLNCTSSQIVHECL

SEQ ID NO: 66 - protein, 120 aa, Homo sapiens
SGSCAVRTCWKQLSPFRETGQVLKLRYDSAVKVSSATNEALGRLELWAPARQGSLTKGLAPRSGDLVYMEDSPSFCRPSKYSPGTAGRVCSREASCSSLCCGRGYDTQSRLVAFSCHCQV

SEQ ID NO: 67 - protein, 352 aa, Mus musculus
MAPLGYLLVLCSLKQALGSYPIWWSLAVGPQYSSLSTQPILCASIPGLVPKQLRFCRNYVEIMPSVAEGVKAGIQECQHQFRGRRWNCTTVSNSLAIFGPVLDKATRESAFVHAIASAGVAFAVTRSCAEGSAAICGCSSRLQGSPGEGWKWGGCSEDIEFGGMVSREFADARENRPDARSAMNRHNNEAGRQAIASHMHLKCKCHGLSGSCEVKTCWWSQPDFRTIGDFLKDKYDSASEMVVEKHRESRGWVETLRPRYTYFKVPTERDLVYYEASPNFCEPNPETGSFGTRDRTCNVSSHGIDGCDLLCCGRGHNARTERRREKCHCVFHWCCYVSCQECTRVYDVHTCK

SEQ ID NO: 68 - protein, 376 aa, Gallus gallus
MKSFCSEVVAKSRLGLKQWGWCGWTPMGSAWKKWISEQRSSLELWDVGSLAIGHQYSSLGTQPILCGSIPGLVPKQLRFCRNYVEIMPSVAEGVKIGIQECQHQFRGRRWNCTTVNDSLAIFGPVLDKATRESAFVHAIASAGVAFAVTRSCAEGSATICGCDTRHKGSPGEGWKWGGCSEDVEFGSMVSREFADARENRPDARSAMNRHNNEAGRTSIIELMHLKCKCHGLSGSCEVKTCWWSQPDFRVIGDYLKDKYDSASEMVVEKHRESRGWVETLRPKYNFFKAPTEKDLVYYENSPNFCEPNPETGSFGTRDRICNVTSHGIDGCDLLCCGRGHNTRTEKRKEKCHCIFHWCCYVRCQECIRVYDVHTCK

SEQ ID NO: 69 - protein, 689 aa, Homo sapiens
MADLEAVLADVSYLMAMEKSKATPAARASKKILLPEPSIRSVMQKYLEDRGEVTFEKIFSQKLGYLLFRDFCLNHLEEARPLVEFYEEIKKYEKLETEEERVARSREIFDSYIMKELLACSHPFSKSATEHVQGHLGKKQVPPDLFQPYIEEICQNLRGDVFQKFIESDKFTRFCQWKNVELNIHLTMNDFSVHRIIGRGGFGEVYGCRKRDTGKMYAMKCLDKKRIKMKQGETLALNERIMLSLVSTGDCPFIVCMSYAFHTPDKLSFILDLMNGGDLHYHLSQHGVFSEADMRFYAAEIILGLEHMHNRFVVYRDLKPANILLDEHGHVRISDLGLACDFSKKKPHASVGTHGYMAPEVLQKGVAYDSSADWFSLGCMLFKLLRGHSPFRQHKTKDKHEIDRMTLTMAVELPDSFSPELHSLLEGLLQRDVNRRLGCLGRGAQEVKESPFFRSLDWQMVFLQKYPPPLIPPRGEVNAADAFDIGSFDEEDTKGIKLLDSDQELYRNFPLTISERWQQEVAETVFDTINAETDRLEARKKAKNKQLGHEEDYALGKDCIMHGYMSKMGNPFLTQWQRRYFYLFPNRLEWRGEGEAPQSLLTMEEIQSVEETQIKERKCLLLKIRGGKQFILQCDSDPELVQWKKELRDAYREAQQLVQRVPKMKNKPRSPVVELSKVPLVQRGSANGL

SEQ ID NO: 70 - protein, 689 aa, Homo sapiens
MADLEAVLADVSYLMAMEKSKATPAARASKKILLPEPSIRSVMQKYLEDRGEVTFEKIFSQKLGYLLFRDFCLNHLEEARPLVEFYEEIKKYEKLETEEERVARSREIFDSYIMKELLACSHPFSKSATEHVQGHLGKKQVPPDLFQPYIEEICQNLRGDVFQKFIESDKFTRFCQWKNVELNIHLTMNDFSVHRIIGRGGFGEVYGCRKRDTGKMYAMKCLDKKRIKMKQGETLALNERIMLSLVSTGDCPFIVCMSYAFHTPDKLSFILDLMNGGDLHYHLSQHGVFSEADMRFYAAEIILGLEHMHNRFVVYRDLKPANILLDEHGHVRISDLGLACDFSKKKPHASVGTHGYMAPEVLQKGVAYDSSADWFSLGCMLFKLLRGHSPFRQHKTKDKHEIDRMTLTMAVELPDSFSPELHSLLEGLLQRDVNRRLGCLGRGAQEVKESPFFRSLDWQMVFLQRYPPPLIPPRGEVNAADAFDIGSFDEEDTKGIKLLDSDQELYRNFPLTISERWQQEVAETVFDTINAETDRLEARKKAKNKQLGHEEDYALGKDCIMHGYMSKMGNPFLTQWQRRYFYLFPNRLEWRGEGEAPQSLLTMEEIQSVEETQIKERKCLLLKIRGGKQFILQCDSDPELVQWKKELRDAYREAQQLVQRVPKMKNKPRSPVVELSKVPLVQRGSANGL

SEQ ID NO: 71 - protein, 687 aa, Mus musculus
DLEAVLADVSYLMAMEKSKATPAARASKKILLPEPSIRSVMQKYLEDRGEVTFEKIFSQKLGYLLFRDFCLNHLEEAKPLVEFYEEIKKYEKLETEEERVVRSREIFDSYIMKELLACSHPFSKNATEHVQGHLVKKQVPPDLFQPYIEEICQNLRGDVFQKFIESDKFTRFCQWKNVELNIHLTMNDFSVHRIIGRGGFGEVYGCRKADTGKMYAMKCLDKKRIKMKQGETLALNERIMLSLVSTGDCPFIVCMSYAFHTPDKLSFILDLMNGGDLHYHLSQHGVFSEADMRFYAAEIILGLEHMHNRFVVYRDLKPANILLDEHGHVRISDLGLACDFSKKRPHASVGTHGYMAPEVLQKGVAYDSSADWFSLGCMLFKLLRGHSPFRQHKTKDKHEIDRMTLTMAVELPDSFSPELRSLLEGLLQRDVNRRLGCLGRGAQEVKESPFFRSLDWQMVFLQKYPPPLIPPRGEVNAADAFDIGSFDEEDTKGIKLLDSDQELYRNFPLTISERWQQEVAETVFDTINAETDRLEARKKAKNKQLGHEEDYALGKDCIVHGYMSKMGNPFLTQWQRRYFYLFPNRLEWRGEGEAPQSLLTMEEIQSVEETQIKERKCLLLKIRGGKQFVLQCDSDPELVQWKKELRDAYREAQQLVQRVPKMKNKPRSPVVELSKVPLIQRGSANGL

SEQ ID NO: 72 - protein, 689 aa, Homo sapiens
MADLEAVLADVSYLMAMEKSKATPAARASKKILLPEPSIRSVMQKYLEDRGEVTFEKIFSQKLGYLLFRDFYLNHLEEAKPLVEFYEEIEKYEKLETEEERVVRSREIFDSYIMKELLACSHPFSKNATEHVQGHLVKKQVPPDLFQPYIEEICQNLRGDVFHKFIESDKFTRFCQWKNVELNIHLTMNDFSVHRIIGRGGFGEVYGCRKADTGKMYAMKCLDKKRIKMKQGETLALNERIMLSLVSTGDCPFIVCMSYAFHTPDKLSFILDLMNGGDLHYHLSQHGVFSEADMRFYAAEIILGLEHMHNRFVVYRDLKPANILLDEHGHVRISDLGLACDFSKKKPHASVGTHGYMAPEVLQKGVAYDSSADWFSLGCMLFKLLRGHSPFRQHKTKDKHEIDRMTLTMAVELPDSFSPELRSLLEGLLQRDVNRRLGCLGRGAQEIKESPFFRSLDWQMVFLQKYPPPLIPPRGEVNAADAFDIGSFDEEDTKGIKLLDSDQELYRNFPLTISERWQQEVAETVFDTINAETDRLEARKKAKNKQLGHEEDYALGKDCIMHGYMSKMGNPFLTQWQRRYFYLFPNRLEWRGEDEAPQSLLTMEEIQSVEETQIKERKCLLLKIRGGKQFVLQCDSDPELVQWKKELRDAYREAQQLVQRVPKMKNKPRSPVVELSKVPLIQRGSANGL

SEQ ID NO: 73 - protein, 1062 aa, Homo sapiens
MAAAPFLKHWRTTFERVEKFVSPIYFTDCNLRGRLFGASCPVAVLSSFLTPERLPYQEAVQRDFRPAQVGDSFGPTWWTCWFRVELTIPEAWVGQEVHLCWESDGEGLVWRDGEPVQGLTKEGEKTSYVLTDRLGERDPRSLTLYVEVACNGLLGAGKGSMIAAPDPEKIFQLSRAELAVFHRDVHMLLVDLELLLGIAKGLGKDNQRSFQALYTANQMVNVCDPAQPETFPVAQALASRFFGQHGGESQHTIHATGHCHIDTAWLWPFKETVRKCARSWVTALQLMERNPEFIFACSQAQQLEWVKSRYPGLYSRIQEFACRGQFVPVGGTWVEMDGNLPSGEAMVRQFLQGQNFFLQEFGKMCSEFWLPDTFGYSAQLPQIMHGCGIRRFLTQKLSWNLVNSFPHHTFFWEGLDGSRVLVHFPPGDSYGMQGSVEEVLKTVANNRDKGRANHSAFLFGFGDGGGGPTQTMLDRLKRLSNTDGLPRVQLSSPRQLFSALESDSEQLCTWVGELFLELHNGTYTTHAQIKKGNRECERILHDVELLSSLALARSAQFLYPAAQLQHLWRLLLLNQFHDVVTGSCIQMVAEEAMCHYEDIRSHGNTLLSAAAAALCAGEPGPEGLLIVNTLPWKRIEVMALPKPGGAHSLALVTVPSMGYAPVPPPTSLQPLLPQQPVFVVQETDGSVTLDNGIIRVKLDPTGRLTSLVLVASGREAIAEGAVGNQFVLFDDVPLYWDAWDVMDYHLETRKPVLGQAGTLAVGTEGGLRGSAWFLLQISPNSRLSQEVVLDVGCPYVRFHTEVHWHEAHKFLKVEFPARVRSSQATYEIQFGHLQRPTHYNTSWDWARFEVWAHRWMDLSEHGFGLALLNDCKYGASVRGSILSLSLLRAPKAPDATADTGRHEFTYALMPHKGSFQDAGVIQAAYSLNFPLLALPAPSPAPATSWSAFSVSSPAVVLETVKQAESSPQRRSLVLRLYEAHGSHVDCWLHLSLPVQEAILCDLLERPDPAGHLTSGQPPEAHLFSLPSAVPVARASASATLSPWGWGFVCRRLWGLLISASPA

SEQ ID NO: 74 - protein, 1040 aa, Homo sapiens
MAAAPALKHWRTTLERVEKFVSPLYFTDCNLRGRLFGASCPVAVLSSFLTPERLPYQEAVQRDFRPAQVGDSFGPTWWTCWFRVELTIPEAWVGQEVHLCWESDGEGLVWRDGEPVQGLTKEGEKTSYVLTDRLGERDPRSLTLYVEVACNGLLGAGKGSMIAAPDPEKMFQLSRAELAVFHRDVHMLLVDLELLLGIAKGLGKDNQRSFQALYTANQMVNVCDPAQPETFPVAQALASRFFGQHGGESQHTIHATGHCHIDTAWLWPFKETVRKCARSWVTALQLMERNPEFIFACSQAQQLEWVKSRYPGLYSRIQEFACRGQFVPVGGTWVEMDGNLPSGEAMVRQFLQGQNFFLQEFGKMCSEFWLPDTFGYSAQLPQIMHGCGIRRFLTQKLSWNLVNSFPHHTFFWEGLDGSRVLVHFPPGDSYGMQGSVEEVLKTVANNRDKGRANHSAFLFGFGDGGGGPTQTMLDRLKRLSNTDGLPRVQLSSPRQLFSALESDSEQLCTWVGELFLELHNGTYTTHAQIKKGNRECERILHDVELLSSLALARSAQFLYPAAQLQHLWRLLLLNQFHDVVTGSCIQMVAEEAMCHYEDIRSHGNTLLSAAAAALCAGEPGPEGLLIVNTLPWKRIEVMALPKPGGAHSLALVTVPSMGYAPVPPPTSLQPLLPQQPVFVVQETDGSVTLDNGIIRVKLDPTGRLTSLVLVASGREAIAEGAVGNQFVLFDDVPLYWDAWDVMDYHLETRKPVLGQAGTLAVGTEGGLRGSAWFLLQISPNSRLSQEVVLDVGCPYVRFHTEVHWHEAHKFLKVEFPARVRSSQATYEIQFGHLQRPTHYNTSWDWARFEVWAHRWMDLSEHGFGLALLNDCKYGASVRGSILSLSLLRAPKAPDATADTGRHEFTYALMPHKGSFQDAGVIQAAYSLNFPLLALPAPSPAPATSWSAFSVSSPAVVLETVKQAESSPQRRSLVLRLYEAHGSHVDCWLHLSLPVQEAILCDLLERPDPAGHLTLRDNRLKLTFSPFQVLSLLLVLQPPPH

SEQ ID NO: 75 - protein, 1039 aa, Homo sapiens
MAAAPFLKHWRTTFERVEKFVSPIYFTDCNLRGRLFGDSCSVTLSSFLTPERLPYEKAVQQNFSPAQVGDSFGPTWWTCWFRVELVIPEVWVGQEVHLCWESDGESLVWRDGEPVQGLTKEGEKTSYVLSERLRASDPRSLTLYVEVACNGLLGAGKGSMIAAPDPEKMFQLSQAKLAVFHRDVHSLLVDLELLLGVAKGLGEDSQRSFQALHTANQMVNICDPAQPETYPAAKALASKFFGQHGGESQHTIHAMGHCHIDTAWLWPFKETVRKCARSWSTAVTLMEQNTDFIFACSQAQQLEWVKSQYPGLHARLQEFACRGQFVPVGGTWVEMDGNLPSGEAMVRQFLQGQNFFLQEFGKMCSEFWLPDTFGYSAQLPQIMQGCGIKRFLTQKLSWNLVNSFPHHTFFWEGLDGSRVLVHFPPGDSYGMQGSVEEVLKTVTNNRDKGRTNHSGFLFGFGDGGGGPTQTMLDRLKRLSNTDGLPRVQLSSPGQLFTALERDSGQLCTWVGELFLELHNGTYTTHAQLKKGNRECEQILHDVEVLSSLALARSAQFLYPAAQLQHLWRLLLLNQFHDVVTGSCIQLVAEDAMNYYEDIRSHGNPLLSAAAAALCAGEPGPKGLLIINTLPWKRTEVLALPKPCGAHSLALVTVPSIGYAPAPTPTSLQPLLPQQPVFVMQETDGSVTLDNGIIRVRLDPTGCLTSLVLVASGREAIAEGALGNQFVLFDDVPLYWDAWDVMDYHLETRKPVLGQAGTLAVGTEGGLRGSAWFLLQISPNSRLSQEVVLDVGCPYVRFHTEVHWHEAHKFLKVEFPARIRSPQATYEIQFGHLQRPTHNNTSWDWARYEVWAHRWIDLSECDFGLALLNNCKYGASVRGNVLSLSLLRAPKAPDATADMGRHEFTYALMPHKGSFQEAGVIHAAYNLNFPLLALPAPGPAPDTTWSAFSVSSPAVVLETIKQAERCHQHRTLVLRLYEAHGSHVDCWLHTSLPVQEATLCDLLEQRDPTGHLSLQDNRLKLTFSPFQVRSLLLVLQSPPN

SEQ ID NO: 76 - protein, 408 aa, Homo sapiens
MAAAPFLKHWTRTTFERVEKFEVSPIYFTDCNALRGRLFGDSCPVTLSSFLTPTERLPYEKAVQEDITTRQNFSPAQVGDNSFGPTWWTCWPFRVELVIPEVWVGKEVHLCWAESDGESLVWRDDGEPVQGLTKSNNEFEGEKTSYVLSTERLHAADPRSRLTLYVEVACNGLLGAGKGSMDIAAPDPEKMFTQLSQAKLAVFFNTNAHRDVHNLLVDSLELLLGVAKGTLGEDNQRSFQAALYTANQMVNICDPAQPETYPAAEALASKFTABRDFGQRGGESQHTIHATGHCHIIDTAWLWPFKETVRKCARSWSTTAVKLMERNTEFTFACSQAQTABSTQLEWVKNQYPSGLYAQLQEFANCRGQFVPVGGLTWVEMDGNLPLSGEAMVRQFLRQGQNFFLQEF

SEQ ID NO: 77 - protein, 258 aa, Homo sapiens
MLLVLVVLIPVLVSSGGPEGHYEMLGTCRMVCDPYPARGPGAGARTDGGDALSEQSGAPPPSTLVQGPQGKPGRTGKPGPPGPPGDPGPPGPVGPPGEKGEPGKPGPPGLPGAGGSGAISTATYTTVPRVAFYAGLKNPHEGYEVLKFDDVVTNLGNNYDAASGKFTCNIPGTYFFTYHVLMRGGDGTSMWADLCKNGQVRASAIAQDADQNYDYASNSVILHLDAGDEVFIKLDGGKAHGGNSNKYSTFSGFIIYSD

SEQ ID NO: 78 - protein, 258 aa, Mus musculus
MLLVLVVLIPVLVSSGGPDGHYEMLGTCRMVCDPYPARGPGAGARSDGGDAVSEQSGAPPPSTLVQGPQGKPGRTGKPGPPGPPGDRGPPGPVGPPGEKGEPGKPGPPGLPGSGGSGAISTATYTTVPRVAFYAGLKNPHEGYEVLKFDDVVTNLGNNYDAASGKFTCNIPGTYFFTYHVLMRGGDGTSMWADLCKNGQVRASAIAQDADQNYDYASNSVILHLDAGDEVFIKLDGGKAHGGNSNKYSTFSGFIIYSD

SEQ ID NO: 79 - protein, 255 aa, Mus musculus
MVLLLVILIPVLVSSAGTSAHYEMLGTCRMVCDPYGGTKAPSTAATPDRGLMQSLPTFIQGPKGEAGRPGKAGPRGPPGEPGPPGPVGPPGEKGEPGRQGLPGPPGAPGLNAAGAISAATYSTVPKIAFYAGLKRQHEGYEVLKFDDVVTNLGNHYDPTTGKFTCSIPGIYFFTYHVLMRGGDGTSMWADLCKNNQVRASAIAQDADQNYDYASNSVVLHLEPGDEVYIKLDGGKAHGGNNNKYSTFSGFIIYAD

SEQ ID NO: 80 - protein, 120 aa, Homo sapiens
MKIPWGSIPVLMLLLLLGLIDISQAQLSCTGPPAIPGIPGIPGTPGPDGQPGTPGIKGEKGLPGLAGDHGEFGEKGDPGIPGNPGKVGPKGPMGPKGGPGAPGAPGPKGESGDYKATQKI

SEQ ID NO: 81 - protein, 1894 aa, Mus musculus
MPLPPLSSRTLLLLLLLLLRGVWIAISSPPAGLGPQPAFRTFVASDWGLTHLVVHEQTGEVYVGAVNRIYKLSGNLTLLRAHVTGPVEDNEKCYPPPSVQSCPHGLGSTDNVNKLLLLDYAANRLLACGSASQGICQFLRLDDLFKLGEPHHRKEHYLSSVREAGSMAGVLIAGPPGQGQAKLFVGTPIDGKSEYFPTLSSRRLMANEEDADMFGFVYQDEFVSSQLKIPSDTLSKFPAFDIYYVYSFRSEQFVYYLTLQLDTQLTSPDAAGEHFFTSKIVRLCVNDPKFYSYVEFPIGCEQAGVEYRLVQDAYLSRPGQALAKQLGLAEDEEVLFTVFAQGQKNRVKPPKESALCLFTLRAIKEKIKERIQSCYRGEGKLSLPWLLNKELGCINSPLQIDDDFCGQDFNQPLGGTVTIEGTPLFVDKEDGLTAVAAYDYQGRTVVFAGTRSGRIRKILVDLANPSGRPALAYESVVAQEGNPILRDLVLSPNRQYLYAMTEKQVTQVPVESCVQYTSCELCLGSRDPHCGWCVLHSICSRQDACERAEEPQRFASDLLQCVQLTVQPRNVSVTMSQVPLVLQAWNVPDLSAGVNCSFEDFTETESILEDGRIHCHSPSAREVAPITQGQGDQRVVKLYLKSKETGKKFASVDFVFYNCSVHQSCLACVNGSFPCHWCKYRHVCTNNAADCAFLEGRVNMSEDCPQILPSTHIYVPVGVVKPITLAARNLPQPQSGQRGYECLFHIPGSPARVTALRFNSSSLQCQNSSYSYEGNDVSDLPVNLSVVWNGNFVIDNPQNIQAHLYKCPALRQSCGLCLKADPRFECGWCVAERRCSLRHHCPADSPASWMHAHHGSSRCTDPKILKLSPETGPRQGGTRLTITGENLGLRFEDVRLGVHVGKVLCSPVESEYISAEQIVCEIGDASTLRAHDALVEVCVRDCSLHYRALSPKRFTFVTPTFYRVSPSRGPLSGGTWIGIEGSHLNAGSDVAVSIGGRPCSFSWRNSREIRCLTPPGHTPGSAPIVININRAQLSNPEVKYNYTEDPTILRIDPEWSINSGGTLLTVTGTNLATVREPRIRAKYGGIERENSCMVYNDTTMVCRAPSIDNPKRSPPELGERPDEIGFIMDNVRTLLVLNSSSFLYYPDPVLEPLSPTGLLELKPSSPLILKGRNLLPPAPGNSRLNYTVLIGSTPCILTVSETQLLCEAPNLTGQHKVTVRAGGFEFSPGMLQVYSDSLLTLPAIVGIGGGGGLLLLVIVAVLIAYKRKSRDADRTLKRLQLQMDNLESRVALECKEAFAELQTDIHELTSDLDGAGIPFLDYRTYAMRVLFPGIEDHPVLKEMEVQANVEKSLTLFGQLLTKKHFLLTFIRTLEAQRSFSMRDRGNVASLIMTALQGEMEYATGVLKQLLSDLIEKNLESKNHPKLLLRRTESVAEKMLTNWFTFLLYKFLKECAGEPLFMLYCAIKQQMEKGPIDAITGEARYSLSEDKLIRQQIDYKTLTLNCVNPEHENAPEVPVKGLNCDTVTQVKEKLLDAVYKGVPYSQRPKAGDMDLEWRQGRMARIILQDEDVTTKIDNDWKRLNTLAHYQVTDGSSVALVPKQTSAYNISNSSTFTKSLSRYESMLRTASSPDSLRSRTPMITPDLESGTKLWHLVKNHDHLDQREGDRGSKMVSEIYLTRLLATKGTLQKFVDDLFETIFSTAHRGSALPLAIKYMFDFLDEQADKHQIHDSDVRHTWKSNCLPLRFWVNVIKNPQFVFDIHKNSITDACLSVVAQTFMDSCSTSEHKLGKDSPSNKLLYAKDIPNYKSWVERYYADIAKMPAISDQDMSAYLAEQSRLHLSQFNSMSALHEIYSYIAKYKDEILVALEKDEQARRQRLRSKLEQVVDTMALSS

SEQ ID NO: 82 - protein, 1754 aa, Homo sapiens
  VARIANT (78): Wherein Xaa is any amino acid.
  VARIANT (123): Wherein Xaa is any amino acid.
  VARIANT (620): Wherein Xaa is any amino acid.
  VARIANT (1474): Wherein Xaa is any amino acid.
GMWAEAGLPRAGGGSQPPFRTFSGSDWGLTHLLVHEQTGEVYVGAVNRIYKLSGNLTLLRAHVTGPVEDNEKCYPPPXVQSCPHGLGNTDNVNKLLLLDYAANRLLACGSASQGICQSLRLDXLFKLGEPHHRKEHYLSSVQEAGSMAGVLIAGPPGQGQAKLFVGTPIDGKSEYFPTLSSRRLMANEEDADMFGFVYQDEFVSSQLKIPSDTLSKFPAFDIYYVYSFRSEQFVYYLTLQLDTQLTSPDAAGEHFFTSKIVRLCVDDPKFYSYVEFPIGCEQAGVEYRLVQDAYLSRPGRALAHQLGLAEDEDVLFTVFAQGQKNRVKPPKESALCLFTLRAIKEKIKERIQSCYRGEGKLSLPWLLNKELGCINSPLQIDDDFRGQDFNQPLGGTVTIEGTPLFVDKDDGLTAVAAYDYRGRTVVFAGTRSGRIRKILVDLSNPGGRPALAYESVVAQEGSPILRDLVLSPNHQYLYAMTEKQVTRVPVESCVQYTSCELCLGSRDPHCGWCVLHSICSRRDACERADEPQRFAADLLQCVQLTVQPRNVSVTMSQVPLVLQAWNVPDLSAGVNCSFEDFTESESVLEDGRIHCRSPSAREVAPITRGQGDQRVVKLYXKSKETGKKFASVDFVFYNCSVHQSCLSCVNGSFPCHWCKYRHVCTHNVADCAFLEGRVNVSEDCPQILPSTQIYVPVGVVKPITLAARNLPQPQSGQRGYECLFHIPGSPARVTALRFNSSSLQCQNSSYSYEGNDVSDLPVNLSVVWNGNFVIDNPQNIQAHLYKCPALRESCGLCLKADPRFECGWCVAERRCSLRHHCAADTPASWMHARHGSSRCTDPKILKLSPETGPRQGGTRLTITGENLGLRFEDVRLGVRVGKVLCSPVESEYISAEQIVCEIGDASSVRAHDALVEVCVRDCSPHYRALSPKRFTFVTPTFYRVSPSRGPLSGGTWIGIEGSHLNAGSDVAVSVGGRPCSFSWRNSREIRCLTPPGQSPGSAPIIININRAQLTNPEVKYNYTEDPTILRIDPEWSINSGGTLLTVTGTNLATVREPRIRAKYGGIERENGCLVYNDTTMVCRAPSVANPVRSPPELGERPDELGFVMDNVRSLLVLNSTSFLYYPDPVLEPLSPTGLLELKPSSPLILKGRNLLPPAPGNSRLNYTVLIGSTPCTLTVSETQLLCEAPNLTGQHKVTVRAGGFEFSPGTLQVYSDSLLTLPAIVGIGGGGGLLLLVIVAVLIAYKRKSRDADRTLKRLQLQMDNLESRVALECKEAFAELQTDIHELTNDLDGAGIPFLDYRTYAMRVLFPGIEDHPVLKEMEVQANVEKSLTLFGQLLTKKHFLLTFIRTLEAQRSFSMRDRGNVASLIMTALQGEMEYATGVLKQLLSDLIEKNLESKNHPKLLLRRTESVAEKMLTNWFTFLLYKFLKECAGEPLFMLYCAIKQQMEKGPIDAITGEARYSLSEDKLIRXQIDYKTLTLNCVNPENENAPEVPVKGLDCDTVTQAKEKLLDAAYKGVPYSQRPKAADMDLEWRQGRMARIILQDEDVTTKIDNDWKRLNTLAHYQVTDGSSVALVPKQTSAYNISNSSTFTKSLSRYESMLRTASSPDSLRSRTPMITPDLESGTKLWHLVKNHDHLDQREGDRGSKMVSEIYLTRLLATKGTLQKFVDDLFETIFSTAHRGSALPLAIKYMFDFLDEQADKHQIHDADVRHTWKSNCLPLRFWVNVIKNPQFVFDIHKNSITDACLSVV

SEQ ID NO: 83 - protein, 160 aa, Xenopus laevis
MLLHAERPLPFHLWTFLVLLGSWIATGDGSPKDFRTFTGSDWSLTHLVVHNKTGEVYVGAINRIYKLSNNLTLLRTHVTGPVEDNEKCYPPPSVQSCPHGLITTNNVNKLLLIDYSDNRLIACGSASQGICQFLRLDDLFKLGEPHHRKEHYLSSVNESG

SEQ ID NO: 84 - protein, 1871 aa, Homo sapiens
  VARIANT (380): Wherein Xaa is any amino acid.
MPSVCLLLLLFLAVGGALGNRPFRAFVVTDTTLTHLAVHRVTGEVFVGAVNRVFKLAPNLTELRAHVTGPVEDNARCYPPPSMRVCAHRLAPVDNINKLLLIDYAARRLVACGSIWQGICQFLRLDDLFKLGEPHHRKEHYLSGAQEPDSMAGVIVEQGQGPSKLFVGTAVDGKSEYFPTLSSRKLISDEDSADMFSLVYQDEFVSSQIKIPSDTLSLYPALDIYYIYGFVSASFVYFLTLQLDTQQTLLDTAGEKFFTSKIVRMCAGDSEFYSYVEFPIGCSWRGVEYRLVQSAHLAKPGLLLAQALGVPADEDVLFTIFSQGQKNRASPPRQTILCLFTLSNINAHIRRRIQSCYRGEGTLALPWLLNKELPCINTPXQINGNFCGLVLNQPLGGLHVIEGLPLLADSTDGMASVAAYTYRQHSVVFIGTRSGSLKKVRVDGFQDAHLYETVPVVDGSPILRDLLFSPDHRHIYLLSEKQVSQLPVETCEQYQSCAACLGSGDPHCGWCVLRHRCCREGACLGASAPHGFAEELSKCVQVRVRPNNVSVTSPGVQLTVTLHNVPDLSAGVSCAFEAAAENEAVLLPSGELLCPSPSLQELRALTRGHGATRTVRLQLLSKETGVRFAGADFVFYNCSVLQSCMSCVGSPYPCHWCKYRHTCTSRPHECSFQEGRVHSPEGCPEILPSGDLLIPVGVMQPLTLRAKNLPQPQSGQKNYECVVRVQGRQQRVPAVRFNSSSVQCQNASYSYEGDEHGDTELDFSVVWDGDFPIDKPPSFRALLYKCWAQRPSCGLCLKADPRFNCGWCISEHRCQLRTHCPAPKTNWMHLSQKGTRCSHPRITQIHPLVGPKEGGTRVTIVGENLGLLSREVGLRVAGVRCNSIPAEYISAERIVCEMEESLVPSPPPGPVELCVGDCSADFRTQSEQVYSFVTPTFDQVSPSRGPASGGTRLTISGSSLDAGSRVTVTVRDSECQFVRRDAKAIVCISPLSTLGPSQAPITLAIDRANISSPGLIYTYTQDPTVTRLEPTWSIINGSTAITVSGTHLLTVQEPRVRAKYRGIETTNTCQVINDTAMLCKAPGIFLGRPQPRAQGEHPDEFGFLLDHVQTARSLNRSSFTYYPDPSFEPLGPSGVLDVKPGSHVVLKGKNLIPAAAGSSRLNYTVLIGGQPCSLTVSDTQLLCDSPSQTGRQPVMVLVGGLEFWLGTLHISAERALTLPAMMGLAAGGGLLLLAITAVLVAYKRKTQDADRTLKRLQLQMDNLESRVALECKEAFAELQTDINELTNHMDEVQIPFLDYRTYAVRVLFPGIEAHPVLKELDTPPNVEKALRLFGQLLHSRAFVLTFIHTLEAQSSFSMRDRGTVASLTMVALQSRLDYATGLLKQLLADLIEKNLESKNHPKLLLRRTESVAEKMLTNWFTFLLHKFLKECAGEPLFLLYCAIKQQMEKGPIDAITGEARYSLSEDKLIRQQIDYKTLTLHCVCPENEGSAQVPVKVLNCDSITQAKDKLLDTVYKGIPYSQRPKAEDMDLEWRQGRMTRIILQDEDVTTKIECDWKRLNSLAHYQVTDGSLVALVPKQVSAYNMANSFTFTRSLSRYESLLRTASSPDSLRSRAPMITPDQETGTKLWHLVKNHDHADHREGDRGSKMVSEIYLTRLLATKGTLQKFVDDLFETVFSTAHRGSALPLAIKYMFDFLDEQADQRQISDPDVRHTWKSNCLPLRFWVNVIKNPQFVFDIHKNSITDACLSVVAQTFMDSCSTSEHRLGKDSPSNKLLYAKDIPNYKSWVERYYRDIAKMASISDQDMDAYLVEQSRLHASDFSVLSALNELYFYVTKYRQEILTALDRDASCRKHKLRQKLEQIISLVSSDS

SEQ ID NO: 85 - protein, 104 aa, Homo sapiens
PSFLVSGTFDARGGRLRGPRTGVRLIIPPGAIPQGTRYTCYLVVHDKLSTPPPLEEGETLLSPVVECGPHGALFLRPVILEVPHCASLRPRDWEIVLLRSENGG

SEQ ID NO: 86 - protein, 104 aa, Homo sapiens
SGFLVSGTFDARGGRLRGPRTGVRLIIPPGAIPQGTRYTCYLVVHDKLSTPPPLEEGETLLSVVECGPHGALFLRPVILEVPHCASLRPRPDWELVLLRSENGG

SEQ ID NO: 87 - protein, 95 aa, Homo sapiens
PPGAASLTELTREKLAKLLDHDLGDDWRELARKLGLSEADIDQIETESPRDLAEQSYQLLRLWEQREGKNATLGTLLEALRKMGRDDAVELLRSE

SEQ ID NO: 88 - protein, 51 aa, Homo sapiens
WGEWSEWSPCSVTCGGGVQTRTRCCNPPPNGGGPCTGPDTETRACNEQPCP

SEQ ID NO: 89 - protein, 82 aa, Homo sapiens
RELCKLLDDPLGRDWRRLARKLGLSEEEIDQIEHENPRLASPTYQLLDLWEQRGGKNATVGTLLEALRKMGRDDAVELLESA

SEQ ID NO: 90 - protein, 44 aa, Homo sapiens
SPWSEWSPCSVTCGKGIRTRQRTCNSPAGGKPCTGDAQETEACM

SEQ ID NO: 91 - protein, 86 aa, Homo sapiens
PPSVTVKEGESVTLSCEASGNPPPTVTWYKQGGKLLAESGRFSVSRSGGNSTLTISNVTPEDSGTYTCAATNSSGSASSGTTLTVL

SEQ ID NO: 92 - protein, 55 aa, Homo sapiens
VTLTCPASGDPVPNITWLKDGKPLPESRVVASGSTLTIKNVSLEDSGLYTCVARN

SEQ ID NO: 93 - protein, 263 aa, Homo sapiens
GLEEEFEKLQRLTPDDLSCTVAILPENRDKNRYKDVLPYDHTRVKLKPPPGEGSDYINASYIDGPNRPKAYIATQGPLPSTVEDFWRMVWEEKVPVIVMLTELVEKGREKCAQYWPEKEGGSLTYGDITVTLKSVEKVDDYTIRTLEVTNTGGSETRTVTHYHYTNWPDHGVPESPKSLLDLVRAVRKSQSTLRNSGPIVVHCSAGVGRTGTFIAIDILLQQLEAGKEVDIFEIVKELRSQRPGMVQTEEQYIFLYRAILEYL

SEQ ID NO: 94 - protein, 235 aa, Homo sapiens
NKEKNRYKDVLPYDHTRVKLKPLGDEDSDYINASYVDGYKKPKAYIATQGPLPNTIEDFWRMVWEEKVRVIVMLTELVEKGREKCAQYWPEKEGGSLTYGDFTVTCVSVEKKKDDYTVRTLELTNSGDDETRTVKHYHYTGWPDHGVPESPKSILDLLRKVRKSKGTPDDGPIVVHCSAGIGRTGTFIAIDILLQQLEKEGVVDVFDTVKKLRSQRPGMVQTEEQYIFIYDAILE

SEQ ID NO: 95 - protein, 105 aa, Homo sapiens
TVKHYHYTGWPDHGVPESPDSILEFLRAVKKSLNKSANNGPVVVHCSAGVGRTGTFVAIDILLQQLEAGTGEVDIFDIVKELRSQRPGAVQTLEQYLFLYRALLE

SEQ ID NO: 96 - protein, 86 aa, Homo sapiens
PSAPTNLTVTDVTSTSLTLSWSPPPDGNGPITGYEVEYQPVNSGEEWNEITVPGTTTSYTLTGLKPGTEYEVRVQAVNGGGNGPPS

SEQ ID NO: 97 - protein, 104 aa, Homo sapiens
PSPPSNLRVTDVTSTSVTLSWEPPPDDITGYIVGYRVEYREEGEWKEVNVTPSSTTEVLLTNLNPGTTYEIKVAAENSAGSYTLTGLKPGTEYEFRVRAVNGEA

SEQ ID NO: 98 - protein, 255 aa, Homo sapiens
ELLEVLGKGAFGKVYLARDKKTGKLVAIKVIKKEKLKKKKRERILREIKILKKLDHPNIVKLYDVFEDDDKLYLVMEYCEGGDLFDLLKKRGRLSEDEARFYARQILSALEYLHSQGIIHRDLKPENILLDSDGHVKLADFGLAKQLDSGGTLLTTFVGTPEYMAPEVLLGKGYGKAVDIWSLGVILYELLTGKPPFPGDDQLLALFKKIGKPPPPFPPPEWKISPEAKDLIKKLLVKDPEKRLTAEEALEHPFF

SEQ ID NO: 99 - protein, 256 aa, Homo sapiens
YELGEKLGSGAFGKVYKGKHKDTGEIVAIKILKKRSLSEKKKRFLREIQILRRLSHPNIVRLLGVFEEDDHLYLVMEYMEGGDLFDYLRRNGLLLSEKEAKKIALQILRGLEYLHSRGIVHRDLKPENILLDENGTVKIADFGLARKLESSSYEKLTTFVGTPEYMAPEVLEGRGYSSKVDVWSLGVILYELLTGKLPFPGIDPLEELFRIKERPRLRLPLPPNCSEELKDLIKKCLNKDPEKRPTAKEILNHPWF

SEQ ID NO: 100 - protein, 257 aa, Homo sapiens
LTLGKKLGEGAFGEVYKGTLKGKGGVEVEVAVKTLKEDASEQQIEEFLREARLMRKLDHPNIVKLLGVCTEEEPLMIVMEYMEGGDLLDYLRKNRPKELSLSDLLSFALQIARGMEYLESKNFVHRDLAARNCLVGENKTVKIADFGLARDLYDDDYYRKKKSPRLPIRWMAPESLKDGKFTSKSDVWSFGVLLWEIFTLGESPYPGMSNEEVLEYLKKGYRLPQPPNCPDEIYDLMLQCWAEDPEDRPTFSELVER

SEQ ID NO: 101 - protein, 186 aa, Homo sapiens
GILLYGPPGTGKTLLAKAVAKELGVPFIEISGSELLSKYVGESEKLVRALFSLARKSAPCIIFIDEIDALAPKRGDVGTGDVSSRVVNQLLTEMDGFEKLSNVIVIGATNRPDLLDPALLRPGRFDRRIEVPLPDEEERLEILKIHLKKKPLEKDVDLDEIARRTPGFSGADLAALCREAALRAIR

SEQ ID NO: 102 - protein, 151 aa, Homo sapiens
PGEVVLIVGPPGSGKTTLARALARELGPDGGGVIYIDGEDLREEALLQLLRLLVLVGEDKLSGSGGQRIRLALALARKLKPDVLILDEITSLLDAEQEALLLLLEELLRLLLLLLKEENVTVIATTNDETDLIPALLRRRFDRRIVLLRIL

SEQ ID NO: 103 - protein, 211 aa, Homo sapiens
MVIFAPLGFVKVLQWVFAIFAFATCGGYSGELQLSVDCANKTESDLNIDIAFAYPFRLHEVTFEAPTCEGDEKKNIALVGDSSSSAEFFVTVAVFAFLYSLAALATYIFFQNKYRENNKGPLIDFIATAVFAFLWLVGSSAWAKGLSDVKMATDPEEIIKGMHACHQPGNKCKELHDPVMSGLNTSVVFGFLNFILWAGNIWFVFKETGWA

SEQ ID NO: 104 - protein, 306 aa, Homo sapiens
LSPRQRQLCRRNPDVMASVSEGAQLAIQECQHQFRGRRWNCSTLDRLRVVFGKVLKKGTRETAFVYAISSAGVAHAVTRACSEGELESCGCDYKKGPGGPQGSWQWGGCSDNVEFGIRFSREFVDARERERDARSLMNLHNNEAGRKAVKSHMRRECKCHGVSGSCSMKTCWLSLPDFRAVGDALKDKYDGAIRVEPNKRGMGQGSAPRLVAKNPRFKPPTRSDLVYLEDSPDYCERDRSTGSLGTQGRVCNKTSKGLDGCELLCCGRGYNTQQVERTEKCNCKFHWCCYVKCEECQEVVEVHTCK

SEQ ID NO: 105 - protein, 300 aa, Homo sapiens
LSRRQRQLCRANPDVMASVAEGAQEGIEECQHQFRFRRWNCSTAGLASIFGKVLRQGTRETAFVYAISSAGVAHAVTRACSQGELDSCGCDYSKRGSGGRGWEWGGCSDNIDFGIGFSREFVDARERRGSDARALMNLHNNEAGRLAVKKTMKRECKCHGVSGSCSVKTCWLQLPEFREIGDYLKEKYDGASEVVLDKRGTRGLVPANRDFKPPTNTDLVYLESSPDFCEKNPKTGSLGTQGRVCNKTSKGLDGCDLLCCGRGYNTEHVEVVERCNCKFHWCCYVKCKQCRERVEKHTCK

SEQ ID NO: 106 - protein, 119 aa, Homo sapiens
SFEKLLKQPIGRLLFREFLETEFSEENLEFWLAVEEYEKTEDPDKRPDKAREIYDEFISPEAPKPEVNLDSELREHTQDNLLKAPTKDLFEEAQREIYDLMRGDSFPRFLESDYFTRFL

SEQ ID NO: 107 - protein, 119 aa, Homo sapiens
SLESLLRDPIGRLLFREFLESEFSEENLEFWLAVEEFKKAEDEEERRSKAKEIYDKYLSPNAPKEVNLDSDLREEIEENLKNEEPPPDLFDEAQEEVYELLEKDSYPRFLESDYYLRFL

SEQ ID NO: 108 - protein, 99 aa, Homo sapiens
IKEGWLLKKSSGGKKSWKKRYFVLFNGVLLYYKSKKKKSSSKPKGSIPLSGCTVREAPDSDSDKKKNCFEIVTPDRKTLLLQAESEEERKEWVEALRKA

SEQ ID NO: 109 - protein, 97 aa, Homo sapiens
VKEGWLLKKSTVKKKRWKKRYFFLFNDVLIYYKDKKKSYEPKGSIPLSGCSVEDVPDSEFKRPNCFQLRSRDGKETFILQAESEEERQDWIKAIQSA

SEQ ID NO: 110 - protein, 55 aa, Homo sapiens
RGIDWDKLENKEIEPPFVPKVKSPTDTSNFDPEFTEESPVLTPVDPPLSESDQDE

SEQ ID NO: 111 - protein, 207 aa, Homo sapiens
VTGGWVMNDEATTHYEDLIDQLTEGHQFLEENFGSDVKPKVGWSIDPFGHSATMPYLLRAQAGFDGFLIQRIHYADKKSFAETKQLEFVWRQSWSLTGSTDLFTHMMPFYSYDPYADEPDEGKPEYWTGYFTSRPALKRLDRQLEHLLRSAEILATQLSVLAGQSKIEGSYAIKLEKLYEQLEELRRALALFQHHDAITGTAKQHVV

SEQ ID NO: 112 - protein, 125 aa, Homo sapiens
AFTAIRSTRPPAPGQPVIFDEVLYNQQGHYDPATGKFTCPVPGLYYFNFHVSSKGTNVCVSLMRNGVPVMSFCDEYAKGTYQVASGGAVLQLRQGDRVWLELDDKQTNGLLGGEGVHSVFSGFLL

SEQ ID NO: 113 - protein, 430 aa, Homo sapiens
LQNLLLDEDNGTLYVGARNRLYVLSLNLISEAEVKTGPVLSSPDCEECVSKGKDPPTDCVNFIRLLLDYNADHLLVCGTNAFQPVCRLINLGNLDRLEVGRESGRGRCPFDPQHNSTAVLVDGELYVGTVADFSGSDPAIYRSLSVRRLKGTSGPSLRTVLYDSRWLNEPNFVYAFESGDFVYFFFRETAVEDENCGKAVVSRVARVCKNDVGGPRSLSKKWTSFLKARLECSVPGEFPFYFNELQAAFLLPAGSESDDVLYGVFSTSSNPIPGSAVCAFSLSDINAVFNEPFKECETGNSQWLPYPRGLVPFPRPGTCPNTPLSSKDLPDDVLNFIKTHPLMDEVVQPLTGRPLFVKTDSNYLLTSIAVDRVRTDGGNYTVLFLGTSDGRILKVVLSRSSSSSESVVLEEISVFDPGSPVSDLVLSPKK

SEQ ID NO: 114 - protein, 431 aa, Homo sapiens
FVTLLLDEDRGRLYVGARNRVYVLNLEDLSEVLNLKTGWPGSCETCEECNMKGKSPLTECTNFIRVLQAYNDTHLYVCGTNAFQPVCTLINLGDLFSLDVDNEEDGCGDCPYDPLGNTTSVLVQGGELYSGTVIDFSGRDPSIRRLLGSHDGLRTEFHDSKWLNLPNFVDSYPIHYVHSFSDDKVYFFFRETAVEDSNCKTIHSRVARVCKNDPGGRSYLELNKWTTFLKARLNCSIPGEGTPFYFNELQAAFVLPTGADTDPVLYGVFTTSSNSSAGSAVCAFSMSDINQVFEGPFKHQSPNSKWLPYRGKVPQPRPGQCPNASGLNLPDDTLNFIRCHPLMDEVVPPLHNVPLFVGQSGNYRLTSIAVDRVRAGDGQIYTVLFLGTDDGRVLKQVVLSRSSSASYLVVVLEESLVFPDGEPVQRMVISS

SEQ ID NO: 115 - protein, 85 aa, Homo sapiens
PVITSISPSSGPLSGGTEITITGSNLGSGEDIKVTFGGTECDVVSQEASQIVCKTPPYANGGPQPVTVSLDGGGLSSSPVTFTYV

SEQ ID NO: 116 - protein, 93 aa, Homo sapiens
DPVITRISPNSGPLSGGTRITLCGKNLDSISVVFVEVGVGEVPCTFLPSDVSQTAIVCKTPPYHNIPGSVPVRVEVGLRNGGVPGEPSPFTYV

SEQ ID NO: 117 - protein, 48 aa, Homo sapiens
NCSQHTSCGSCLSAPDPGCGWCPSRKRCTRLEECSRGEGWSQSQETCP

SEQ ID NO: 118 - protein, 42 aa, Homo sapiens
SAYTSCSECLLARDPYCAWCSSQGRCTSGERCDSLRQNWSSG

SEQ ID NO: 119 - DNA, 21 bp, Artificial Sequence
  Description of Artificial Sequence: chemically synthesized
agactggggccagggagacag

SEQ ID NO: 120 - DNA, 23 bp, Artificial Sequence
  Description of Artificial Sequence: chemically synthesized
cagaggccaaacatccccatcag

SEQ ID NO: 121 - DNA, 19 bp, Artificial Sequence
  Description of Artificial Sequence: chemically synthesized
gagacagccctgggggaga

SEQ ID NO: 122 - DNA, 19 bp, Artificial Sequence
  Description of Artificial Sequence: chemically synthesized
acctgcctcctgccagtcc

SEQ ID NO: 123 - DNA, 21 bp, Artificial Sequence
  Description of Artificial Sequence: chemically synthesized
catgtcctcgaccgagagcgc

SEQ ID NO: 124 - DNA, 23 bp, Artificial Sequence
  Description of Artificial Sequence: chemically synthesized
aggtggggggctgcttactgctt

SEQ ID NO: 125 - DNA, 18 bp, Artificial Sequence
  Description of Artificial Sequence: chemically synthesized
gtcatgaaggggttgctg

SEQ ID NO: 126 - DNA, 19 bp, Artificial Sequence
  Description of Artificial Sequence: chemically synthesized
ggtcagcccagcccctctg

SEQ ID NO: 127 - DNA, 18 bp, Artificial Sequence
  Description of Artificial Sequence: chemically synthesized
cggctgctggcatgggtg

SEQ ID NO: 128 - DNA, 24 bp, Artificial Sequence
  Description of Artificial Sequence: chemically synthesized
ctcctgctctgtttcccccttcat

SEQ ID NO: 129 - DNA, 20 bp, Artificial Sequence
  Description of Artificial Sequence: chemically synthesized
gccatggtgctgctgctgct

SEQ ID NO: 130 - DNA, 26 bp, Artificial Sequence
  Description of Artificial Sequence: chemically synthesized
ggctcagtcggggtagatgataaagc

SEQ ID NO: 131 - DNA, 19 bp, Artificial Sequence
  Description of Artificial Sequence: chemically synthesized
cgggcgcggccgtcggagt

SEQ ID NO: 132 - DNA, 28 bp, Artificial Sequence
  Description of Artificial Sequence: chemically synthesized
cggggccggctcagtcggggtagatgat

SEQ ID NO: 133 - DNA, 22 bp, Artificial Sequence
  Description of Artificial Sequence: chemically synthesized
tgacttcgacacagacatcact

SEQ ID NO: 134 - DNA, 24 bp, Artificial Sequence
  Description of Artificial Sequence: chemically synthesized
actcatctgctgccctgactggtg

SEQ ID NO: 135 - DNA, 21 bp, Artificial Sequence
  Description of Artificial Sequence: chemically synthesized
ccttgccgtcttaaagttgac

SEQ ID NO: 136 - DNA, 22 bp, Artificial Sequence
  Description of Artificial Sequence: chemically synthesized
tgacttcgacacagacatcact

SEQ ID NO: 137 - DNA, 24 bp, Artificial Sequence
  Description of Artificial Sequence: chemically synthesized
actcatctgctgccctgactggtg

SEQ ID NO: 138 - DNA, 21 bp, Artificial Sequence
  Description of Artificial Sequence: chemically synthesized
ccttgccgtcttaaagttgac

SEQ ID NO: 139 - DNA, 19 bp, Artificial Sequence
  Description of Artificial Sequence: chemically synthesized
ggctccctggacactctct

SEQ ID NO: 140 - DNA, 26 bp, Artificial Sequence
  Description of Artificial Sequence: chemically synthesized
ctgtcaccacccagctgggaccttat

SEQ ID NO: 141 - DNA, 20 bp, Artificial Sequence
  Description of Artificial Sequence: chemically synthesized
tggacagtgggatcttgaag

SEQ ID NO: 142 - DNA, 22 bp, Artificial Sequence
  Description of Artificial Sequence: chemically synthesized
tgacttcgacacagacatcact

SEQ ID NO: 143 - DNA, 24 bp, Artificial Sequence
  Description of Artificial Sequence: chemically synthesized
actcatctgctgccctgactggtg

SEQ ID NO: 144 - DNA, 21 bp, Artificial Sequence
  Description of Artificial Sequence: chemically synthesized
ccttgccgtcttaaagttgac

SEQ ID NO: 145 - DNA, 22 bp, Artificial Sequence
  Description of Artificial Sequence: chemically synthesized
gaagtgaaagaatgtgcatggt

SEQ ID NO: 146 - DNA, 27 bp, Artificial Sequence
  Description of Artificial Sequence: chemically synthesized
caccagtgcattctggatctcttatca

SEQ ID NO: 147 - DNA, 22 bp, Artificial Sequence
  Description of Artificial Sequence: chemically synthesized
tgggctgattacttcccttatt

SEQ ID NO: 148 - DNA, 21 bp, Artificial Sequence
  Description of Artificial Sequence: chemically synthesized
agatgagtcagtgccgttagc

SEQ ID NO: 149 - DNA, 29 bp, Artificial Sequence
  Description of Artificial Sequence: chemically synthesized
cctccacaaaatttgactttaatcaactg

SEQ ID NO: 150 - DNA, 22 bp, Artificial Sequence
  Description of Artificial Sequence: chemically synthesized
tccatttcagccatacaaagtc

SEQ ID NO: 151 - DNA, 22 bp, Artificial Sequence
  Description of Artificial Sequence: chemically synthesized
accttaagtcctgccaacaatt

SEQ ID NO: 152 - DNA, 26 bp, Artificial Sequence
  Description of Artificial Sequence: chemically synthesized
ttacagagtccaaattgtggatccca

SEQ ID NO: 153 - DNA, 21 bp, Artificial Sequence
  Description of Artificial Sequence: chemically synthesized
tgatcccttccagaatttgac

SEQ ID NO: 154 - DNA, 19 bp, Artificial Sequence
  Description of Artificial Sequence: chemically synthesized
gagccagggctgctgtata

SEQ ID NO: 155 - DNA, 26 bp, Artificial Sequence
  Description of Artificial Sequence: chemically synthesized
cctctcaggaacatgctaccaaaatt

SEQ ID NO: 156 - DNA, 20 bp, Artificial Sequence
  Description of Artificial Sequence: chemically synthesized
tagattgagggcagcagtca

SEQ ID NO: 157 - DNA, 20 bp, Artificial Sequence
  Description of Artificial Sequence: chemically synthesized
aactgccactggtgacactt

SEQ ID NO: 158 - DNA, 28 bp, Artificial Sequence
  Description of Artificial Sequence: chemically synthesized
cacactcagtgtcggttaaaattactga

SEQ ID NO: 159 - DNA, 21 bp, Artificial Sequence
  Description of Artificial Sequence: chemically synthesized
tgaattcttccaccatgagaa

SEQ ID NO: 160 - DNA, 21 bp, Artificial Sequence
  Description of Artificial Sequence: chemically synthesized
atttggctatcccttcaggtt

SEQ ID NO: 161 - DNA, 25 bp, Artificial Sequence
  Description of Artificial Sequence: chemically synthesized
cggatccaatatgagatgcccctct

SEQ ID NO: 162 - DNA, 22 bp, Artificial Sequence
  Description of Artificial Sequence: chemically synthesized
gtcttggagctggactcttcat

SEQ ID NO: 163 - DNA, 22 bp, Artificial Sequence
  Description of Artificial Sequence: chemically synthesized
accaggatgagtttgtgtcatc

SEQ ID NO: 164 - DNA, 25 bp, Artificial Sequence
  Description of Artificial Sequence: chemically synthesized
ctcaagatcccttcggacacgctgt

SEQ ID NO: 165 - DNA, 22 bp, Artificial Sequence
  Description of Artificial Sequence: chemically synthesized
tgcggaagctgtacacatagta

SEQ ID NO: 166 - DNA, 22 bp, Artificial Sequence
  Description of Artificial Sequence: chemically synthesized
accaggatgagtttgtgtcatc

SEQ ID NO: 167 - DNA, 25 bp, Artificial Sequence
  Description of Artificial Sequence: chemically synthesized
ctcaagatcccttcggacacgctgt

SEQ ID NO: 168 - DNA, 22 bp, Artificial Sequence
  Description of Artificial Sequence: chemically synthesized
tgcggaagctgtacacatagta

SEQ ID NO: 169 - DNA, 22 bp, Artificial Sequence
  Description of Artificial Sequence: chemically synthesized
tagttatctacctgcgcttcca

SEQ ID NO: 170 - DNA, 26 bp, Artificial Sequence
  Description of Artificial Sequence: chemically synthesized
tctacacagagaacaaacgcttcccg

SEQ ID NO: 171 - DNA, 22 bp, Artificial Sequence
  Description of Artificial Sequence: chemically synthesized
gaaggtgaaggagacagtcaca

SEQ ID NO: 172 - DNA, 20 bp, Artificial Sequence
  Description of Artificial Sequence: chemically synthesized
gacctggtgtacatggagga

SEQ ID NO: 173 - DNA, 23 bp, Artificial Sequence
  Description of Artificial Sequence: chemically synthesized
cttctgccggcccagcaagtact

SEQ ID NO: 174 - DNA, 19 bp, Artificial Sequence
  Description of Artificial Sequence: chemically synthesized
gagcacaccctacctgctg

SEQ ID NO: 175 - DNA, 21 bp, Artificial Sequence
  Description of Artificial Sequence: chemically synthesized
gtccaagagaggaaacaagga

SEQ ID NO: 176 - DNA, 24 bp, Artificial Sequence
  Description of Artificial Sequence: chemically synthesized
cacaatacccacgtgggcatcaag

SEQ ID NO: 177 - DNA, 20 bp, Artificial Sequence
  Description of Artificial Sequence: chemically synthesized
gtcctgaggccactcttcac

SEQ ID NO: 178 - DNA, 20 bp, Artificial Sequence
  Description of Artificial Sequence: chemically synthesized
ggatgactcgcctagcttct

SEQ ID NO: 179 - DNA, 23 bp, Artificial Sequence
  Description of Artificial Sequence: chemically synthesized
gccgtaggtgccaccgtgagaag

SEQ ID NO: 180 - DNA, 19 bp, Artificial Sequence
  Description of Artificial Sequence: chemically synthesized
agcagatgctctcgcagtt

SEQ ID NO: 181 - DNA, 22 bp, Artificial Sequence
  Description of Artificial Sequence: chemically synthesized
cattgagagcgataagttcaca

SEQ ID NO: 182 - DNA, 26 bp, Artificial Sequence
  Description of Artificial Sequence: chemically synthesized
agaatgtggagctcaacatccacctg

SEQ ID NO: 183 - DNA, 20 bp, Artificial Sequence
  Description of Artificial Sequence: chemically synthesized
gatgcacgctgaagtcattc

SEQ ID NO: 184 - DNA, 22 bp, Artificial Sequence
  Description of Artificial Sequence: chemically synthesized
ctctggggactcctaatttctg

SEQ ID NO: 185 - DNA, 26 bp, Artificial Sequence
  Description of Artificial Sequence: chemically synthesized
cccagcctaaagcagggatcagtctt

SEQ ID NO: 186 - DNA, 22 bp, Artificial Sequence
  Description of Artificial Sequence: chemically synthesized
tccaaggatttattccacaaga

SEQ ID NO: 187 - DNA, 20 bp, Artificial Sequence
  Description of Artificial Sequence: chemically synthesized
acgaggtcttcatcaagctg

SEQ ID NO: 188 - DNA, 26 bp, Artificial Sequence
  Description of Artificial Sequence: chemically synthesized
caccaacaagtacagcaccttctccg

SEQ ID NO: 189 - DNA, 20 bp, Artificial Sequence
  Description of Artificial Sequence: chemically synthesized
cagtcggggtagatgatgaa

SEQ ID NO: 190 - DNA, 22 bp, Artificial Sequence
  Description of Artificial Sequence: chemically synthesized
accaggatgagtttgtgtcatc

SEQ ID NO: 191 - DNA, 25 bp, Artificial Sequence
  Description of Artificial Sequence: chemically synthesized
ctcaagatcccttcggacacgctgt

SEQ ID NO: 192 - DNA, 22 bp, Artificial Sequence
  Description of Artificial Sequence: chemically synthesized
tgcggaagctgtacacatagta

SEQ ID NO: 193 - DNA, 22 bp, Artificial Sequence
  Description of Artificial Sequence: chemically synthesized
accaggatgagtttgtgtcatc

SEQ ID NO: 194 - DNA, 25 bp, Artificial Sequence
  Description of Artificial Sequence: chemically synthesized
ctcaagatcccttcggacacgctgt

SEQ ID NO: 195 - DNA, 22 bp, Artificial Sequence
  Description of Artificial Sequence: chemically synthesized
tgcggaagctgtacacatagta

SEQ ID NO: 196 - DNA, 32 bp, Artificial Sequence
  Description of Artificial Sequence: chemically synthesized
agatctcaggtagatgtttccaatgtcgttcc

SEQ ID NO: 197 - DNA, 35 bp, Artificial Sequence
  Description of Artificial Sequence: chemically synthesized
ctcgaggctagcgttacataagcactgtattcaac

SEQ ID NO: 198 - DNA, 41 bp, Artificial Sequence
  Description of Artificial Sequence: chemically synthesized
ggatcctcccgcgggccagcgcactacgagatgctgggtcg

SEQ ID NO: 199 - DNA, 50 bp, Artificial Sequence
  Description of Artificial Sequence: chemically synthesized
ctcgaggtcggggtagatgatgaagccggagaaggtgctgtacttgttgg

SEQ ID NO: 200 - DNA, 18 bp, Artificial Sequence
  Description of Artificial Sequence: chemically synthesized
gccctcccggtccaggtc

SEQ ID NO: 201 - DNA, 19 bp, Artificial Sequence
  Description of Artificial Sequence: chemically synthesized
ggcgacggcaccagcatgt

SEQ ID NO: 202 - DNA, 19 bp, Artificial Sequence
  Description of Artificial Sequence: chemically synthesized
gcctggcctgccgggttct

SEQ ID NO: 203 - DNA, 19 bp, Artificial Sequence
  Description of Artificial Sequence: chemically synthesized
catgagcacgtggtaagcg

SEQ ID NO: 204 - DNA, 24 bp, Artificial Sequence
  Description of Artificial Sequence: chemically synthesized
gtgctggcattggagtgtttagtg

SEQ ID NO: 205 - DNA, 25 bp, Artificial Sequence
  Description of Artificial Sequence: chemically synthesized
atcaagcacgttgacacagaatgag

SEQ ID NO: 206 - DNA, 27 bp, Artificial Sequence
  Description of Artificial Sequence: chemically synthesized
gcattcactaacctaacaccatttaca

SEQ ID NO: 207 - DNA, 27 bp, Artificial Sequence
  Description of Artificial Sequence: chemically synthesized
gttcagcagagatgtcgtctgaccttc

SEQ ID NO: 208 - DNA, 25 bp, Artificial Sequence
  Description of Artificial Sequence: chemically synthesized
gggatcctccagatcctgtattttt

SEQ ID NO: 209 - DNA, 27 bp, Artificial Sequence
  Description of Artificial Sequence: chemically synthesized
tgaagaacacatcaacaacagacataa

SEQ ID NO: 210 - DNA, 27 bp, Artificial Sequence
  Description of Artificial Sequence: chemically synthesized
actgttttcagcagctaccttaatttc

SEQ ID NO: 211 - DNA, 24 bp, Artificial Sequence
  Description of Artificial Sequence: chemically synthesized
cttgatgaatgtgtggtacgcgat

SEQ ID NO: 212 - DNA, 26 bp, Artificial Sequence
  Description of Artificial Sequence: chemically synthesized
gtgaatgcaaacttgaggtcttttgt

SEQ ID NO: 213 - DNA, 29 bp, Artificial Sequence
  Description of Artificial Sequence: chemically synthesized
cctcatataatcctaccattggctgtact

SEQ ID NO: 214 - DNA, 27 bp, Artificial Sequence
  Description of Artificial Sequence: chemically synthesized
gaggatcccagtgtaaaaatacttctg

SEQ ID NO: 215 - DNA, 27 bp, Artificial Sequence
  Description of Artificial Sequence: chemically synthesized
tagcacttcataagcaataatgatccc

SEQ ID NO: 216 - DNA, 28 bp, Artificial Sequence
  Description of Artificial Sequence: chemically synthesized
tgagtgtactagcagacacctcaatgat
